(19) United States
(12) Patent Application Publication
(10) Pub. No.: US 2024/0425607 A1
(43) Pub. Date: Dec. 26, 2024

(54) IL-18BP ANTAGONIST ANTIBODIES AND THEIR USE IN MONOTHERAPY AND COMBINATION THERAPY IN THE TREATMENT OF CANCER

(71) Applicant: Compugen Ltd., Holon (IL)

(72) Inventors: Nels P. Nielson, Lebanon, NH (US); Alissa M. Chiasson, Lebanon, NH (US); Assaf Menachem, Kfar Saba (IL); Eran Ophir, Even Yehuda (IL); Lior Faigenbloom, Kfar-Sava (IL); Sandra Vols, Tel Aviv-Yafo (IL); Dan Blat, Raanana (IL); Zoya Alteber, Nes Ziyona (IL); Roy Granit, Modiin (IL); Masha Frenkel, Ashdod (IL); Keren Cohen, Ramat Gan (IL); Olga Leiderman, Rishon LeZion (IL); Tal Fridman-Kfir, Tel Aviv (IL); Moran Galperin, Ashdod (IL); Hadas Galon Tilleman, Ramot HaShavim (IL); Nadav Cohen, Rehovot (IL); Gad Cojocaru, Ramat-HaSharon (IL); Amir Toporik, Pardes Hanah Carkur (IL); Amit Novik, Binyamina (IL); Lital Sever, Tel Aviv (IL)

(21) Appl. No.: 18/754,029

(22) Filed: Jun. 25, 2024

Related U.S. Application Data
(60) Provisional application No. 63/608,147, filed on Dec. 8, 2023.
(60) Provisional application No. 63/592,140, filed on Oct. 20, 2023.
(60) Provisional application No. 63/516,116, filed on Jul. 27, 2023.
(60) Provisional application No. 63/510,343, filed on Jun. 26, 2023.

(51) Int. Cl. C07K 16/28; A61K 39/00; A61K 39/395; A61P 35/00

(52) U.S. Cl. CPC C07K 16/2866; A61K 39/39558; A61P 35/00; A61K 2039/505; C07K 2317/55; C07K 2317/565; C07K 2317/74; C07K 2317/92

(57) ABSTRACT

The present invention is directed to anti-IL18-BP antibodies and uses thereof. The present invention is directed to monotherapy and combination treatments with for example immune checkpoint inhibitor antibodies, as described herein.

### RELATED APPLICATIONS

[0001] This application claims priority to and the benefit of U.S. Provisional Patent Application No. 63/608,147, filed on Dec. 8, 2023, U.S. Provisional Patent Application No. 63/592,140, filed on Oct. 20, 2023, U.S. Provisional Patent Application No. 63/516,116, filed on Jul. 27, 2023, and U.S. Provisional Patent Application No. 63/510,343, filed on Jun. 26, 2023, the entire contents of which are incorporated herein by reference.

### SEQUENCE LISTING

[0002] The XML file submitted herewith via Patent Center, entitled “210196-215005_US_SL” and created on May 28, 2024, having a size of 2,913,343 bytes, is hereby incorporated by reference in its entirety.

### BACKGROUND OF THE INVENTION

[0003] Interleukin 18 (IL-18) is a pro-inflammatory cytokine that can stimulate T-cells, NK-cells, and myeloid cells. IL-18 has been proposed as an immunotherapeutic agent for the treatment of cancer, given its ability to stimulate anti-tumor immune cells. However, the clinical efficacy of IL-18 has been limited and as such there is a need for compositions and methods that provide effective IL-18 signaling activity to treat and prevent cancer and other diseases and disorders.

[0004] Interleukin 18 Binding Protein (IL18-BP) binds IL18, prevents the binding of IL18 to its receptor, and thus functions as an inhibitor of the proinflammatory cytokine, IL18. IL18-BP inhibits IL18-induced T and NK cell activation and proliferation, and pro-inflammatory cytokine production, resulting in reduced T and NK cell activity and T-helper type 1 immune responses.

[0005] It is an object of the invention to provide anti-IL18-BP antibodies or use in disease treatment. The present invention meets this need by providing anti-IL18-BP antibodies (including antigen-binding fragments), in particular anti-IL18-BP antibodies that block IL18-BP, can be used in treating diseases such as cancer.

### BRIEF SUMMARY OF THE INVENTION

[0006] The present invention provides methods related to anti-IL18-BP (interleukin-18 binding protein) antibodies.

[0007] In some embodiments, the present invention provides a method of modulating the tumor microenvironment in a patient comprising administering a composition comprising an anti-IL18-BP antibody, and wherein the said tumor microenvironment is modulated as compared to the tumor microenvironment in an untreated patient or in a control treated patient.

[0008] In some embodiments, the modulation comprises infiltration of the tumor microenvironment by CD45+ cells.

[0009] In some embodiments, the modulation comprises an increase in CD3+ cells, CD4+ cells, and CD8+ cells in the lymphoid compartment.

[0010] In some embodiments, the modulation comprises an increase in the percentage of effector CD8+ cells in the tumor microenvironment.

[0011] In some embodiments, the modulation comprises induction of multifunctional granzyme B+IFNγ+-secreting CD8+ cells.

[0012] In some embodiments, the modulation comprises induction of TNFα- and TNFα+ IFNγ+-secreting NK cells.

[0013] In some embodiments, the modulation comprises induction of DC2 cells.

[0014] In some embodiments, the modulating comprises increasing levels of IFNγ, TNFα, and IL-12p70 cytokines.

[0015] In some embodiments, the modulation comprises increased secretion of CXCL9 and IFNγ-regulated cytokine.

[0016] In some embodiments, the modulation comprises increased MIP-1α secretion.

[0017] In some embodiments, the modulation comprises decreased IL1b secretion

[0018] In some embodiments, the modulation comprises an increase in the proportion of T cells in tumors.

[0019] In some embodiments, the modulation comprises increased effector polyfunctional CD8+ T cells that express perforin, multiple granzymes, and IFNγ.

[0020] In some embodiments, the modulation comprises an increased in number of proliferating CD8+ T cells.

[0021] In some embodiments, the modulation comprises a shift in the T cell compartment from naïve T cells towards cytotoxic CD8 effector T cells.

[0022] In some embodiments, the modulation further comprises T cell clonal expansion.

[0023] In some embodiments, T cell clonal expansion comprises expansion above 3 cells per clone.

[0024] In some embodiments, T cell clonal expansion comprises expansion of GZMB-high and proliferating CD8+ T cells.

[0025] In some embodiments, the modulation comprises increased CD8+ T cell infiltration in the tumor microenvironment but not in serum or spleen.

[0026] In some embodiments, the modulation comprises increased IFNγ secretion in the tumor microenvironment but not in serum or spleen.

[0027] In some embodiments, the modulation comprises increased secretion of IL2 and TNFα from CD4+ T cells.

[0028] In some embodiments, the modulation comprises increased secretion of IFNγ+. IL2+, and granzyme B+ from CD8+ T cells.

[0029] In some embodiments, the modulation does not comprise expansion of exhausted T cells.

[0030] In some embodiments, the modulation comprises an increase in inflammatory MHCII^{high}C1qa+ and Nos2⁺ macrophages in the monocyte and macrophage compartment.

[0031] In some embodiments, the modulation comprises an increase in activated dendritic cells in the monocyte and macrophage compartment.

[0032] In some embodiments, the modulation comprises a decrease in MHCII^{low}C1qa+ macrophages, suppressive Mrc1⁺ macrophages, Ifit⁺ MonoMacs and low-activated DCs in the monocyte and macrophage compartment.

[0033] In some embodiments, the modulation comprises an increase in inflammatory myeloid cells.

[0034] In some embodiments, the modulation comprises an increase in IL18 not bound to IL-18BP in tumor microenvironment cell populations sufficient to enhance immunoreactivity upon administration, wherein immunoreactivity is measured as activation of T cells and NK cells.

[0035] In some embodiments, the modulation comprises increasing the proportion of the cell populations of myeloid lineage that develop into proinflammatory macrophages.

[0036] Also provided herein is a method of treating cancer in a patient, comprising administering a composition comprising an anti-IL18-BP antibody, and wherein said cancer is treated.

[0037] Further provided herein is a method of treating cancer in a patient, comprising administering a composition comprising an anti-IL18-BP antibody, wherein said anti-IL18-BP antibody activates T cells, NK cells, NKT cells, Dendritic cells, MAIT T cells, γδ T cells, and/or innate lymphoid cells (ILCs), and/or modulates Myeloid cells, and wherein said cancer is treated.

[0038] Also provided herein is a method of activating T-cells of a patient comprising administering a composition comprising an anti-IL18-BP antibody, and wherein said T-cells are activated.

[0039] Further provided herein is a method of activating NK-cells of a patient comprising administering a composition comprising an anti-IL18-BP antibody, and wherein said NK-cells are activated.

[0040] Also provided herein is a method of activating NKT-cells of a patient comprising administering a composition comprising an anti-IL18-BP antibody, and wherein said NKT-cells are activated.

[0041] Also provided herein is a method of modulating myeloid cells of a patient comprising administering a composition comprising an anti-IL18-BP antibody, and wherein said myeloid cells are modulated.

[0042] Further provided herein is a method of activating dendritic cells of a patient comprising administering a composition comprising an anti-IL18-BP antibody, and wherein said dendritic cells are activated.

[0043] Also provided herein is a method of activating dendritic cells of a patient comprising administering a composition comprising an anti-IL18-BP antibody, and wherein said MAIT T cells are activated.

[0044] Also provided herein is a method of activating dendritic cells of a patient comprising administering a composition comprising an anti-IL18-BP antibody, and wherein said γδ T cells are activated.

[0045] Further provided herein is a method of activating ILC cells of a patient comprising administering a composition comprising an anti-IL18-BP antibody, and wherein said ILC cells are activated.

[0046] Also provided herein is a method of increasing IL-18 mediated immuno-stimulating activity in the tumor microenvironment (TME), and/or lymph nodes, comprising administering a composition comprising an anti-IL18-BP antibody, wherein said anti-IL18-BP antibody increases IL-18 mediated immuno-stimulating activity in the TME, and/or lymph nodes.

[0047] Also provided herein is a method of restoring IL-18 activity on T cells, NK cells, NKT cells, Myeloid cells, Dendritic cells, MAIT T cells, 76 T cells, and/or innate lymphoid cells (TLCs), comprising administering a composition comprising an anti-IL18-BP antibody, wherein said anti-IL18-BP antibody restores activity on T cells, NK cells, NKT cells, Myeloid cells, Dendritic cells, and/or innate lymphoid cells (ILCs).

[0048] Also provided herein is a method of modulating the tumor microenvironment in a patient comprising administering a composition comprising an anti-IL18-BP antibody, and wherein the said tumor microenvironment is modulated as compared to the tumor microenvironment in an untreated patient or in a control treated patient.

[0049] In some embodiments, said composition comprises anti-IL18-BP antibody is administered as a stable liquid pharmaceutical formulation.

[0050] In some embodiments, said T-cells are cytotoxic T-cells (CTLs).

[0051] In some embodiments, said T-cells are selected from the group consisting of CD4+ T-cells and CD8+ T-cells.

[0052] In some embodiments, said patient exhibits an increase in tumor growth inhibition of at least about 10%, 20%, 30%, 40%, 50%, 60%, 70%, 80%, 90%, 100%, 125%, 150%, 175%, 200%, 225%, 250%, 275%, 300%, 325%, 350%, 375%, 400%, 425%, 450%, 475%, 500%, 525%, 550%, 575%, 600%, 625%, 650%, 675%, 700%, 725%, 750%, 775%, 800%, 825%, 850%, 875%, 900%, 925%, 950%, 975%, or 1000%, as compared to a control or an untreated patient.

[0053] In some embodiments, said patient exhibits a decrease in tumor growth of at least about 10%, 20%, 30%, 40%, 50%, 60%, 70%, 80%, 90%, 100%, 125%, 150%, 175%, 200%, 225%, 250%, 275%, 300%, 325%, 350%, 375%, 400%, 425%, 450%, 475%, 500%, 525%, 550%, 575%, 600%, 625%, 650%, 675%, 700%, 725%, 750%, 775%, 800%, 825%, 850%, 875%, 900%, 925%, 950%, 975%, or 1000%, as compared to a control or an untreated patient.

[0054] In some embodiments, said NK-cells are CD16+ lymphocytes.

[0055] In some embodiments, said NK-cells are CD56+NK cells.

[0056] In some embodiments, said activation is measured as an increase in expression of one or more activation markers.

[0057] In some embodiments, said activation markers are selected from the group consisting of CD107a, CD137, CD69, granzyme, and perforin.

[0058] In some embodiments, said activation is measured as an increase in proliferation of said NK-cells.

[0059] In some embodiments, said activation is measured as an increase in secretion of one or more cytokines.

[0060] In some embodiments, said one or more cytokines is selected from the group consisting of IFNγ, TNF, GMCSF, MIG (CXCL9), IP-10 (CXCL10) and MCP1 (CCL2).

[0061] In some embodiments, said activation is measured as an increase in direct killing of target cells.

[0062] In some embodiments, the method further comprises administering a second antibody.

[0063] In some embodiments, said second antibody is an antibody that binds to and/or inhibits a human checkpoint receptor protein.

[0064] In some embodiments, said second antibody is selected from the group consisting of an anti-PVRIG antibody, an anti-PD-1 antibody, an anti-PD-L1 antibody, an anti-TIGIT antibody, an anti-CTLA-4 antibody, an anti-PD-L2 antibody, an anti-B7-H3 antibody, an anti B7-H4 antibody, an anti-CEACAM-1 antibody, an anti-PVR antibody, an anti-LAG3 antibody, an anti-CD112 antibody, an anti-CD96 antibody, an anti-TIM3 antibody, an anti-BTLA antibody, an anti-ICOS antibody, an anti-OX40 antibody, or an anti-41BB antibody, an anti-CD27 antibody, or an anti-GITR antibody.

[0065] In some embodiments, the PVRIG antibody is selected from the group consisting of CHA.7.518.1.H4(S241P) and CHA.7.538.1.2.H4(S241P).

[0066] In some embodiments, said anti-PVRIG antibody comprises: i) a heavy chain variable domain comprising the vhCDR1, vhCDR2, and vhCDR3 from CHA.7.518.1.H4(S241P) (SEQ ID NO:260) and ii) a light chain variable domain comprising the vlCDR1, vlCDR2, and vlCDR3 from CHA.7.518.1.H4(S241P) (SEQ ID NO:265).

[0067] In some embodiments, said anti-PVRIG antibody comprises: i) a heavy chain variable domain comprising the vhCDR1, vhCDR2, and vhCDR3 from CHA.7.538.1.2.H4(S241P) (SEQ ID NO:270) and ii) a light chain variable domain comprising the vlCDR1, vlCDR2, and vlCDR3 from CHA.7.538.1.2.H4(S241P) (SEQ ID NO:275).

[0068] In some embodiments, said anti-PVRIG antibody comprises: i) a heavy chain variable domain comprising the vhCDR1, vhCDR2, and vhCDR3 from CHA.7.518.4 (SEQ ID NO:1453; FIG. 36AG) and ii) a light chain variable domain comprising the vlCDR1, vlCDR2, and vlCDR3 from CHA.7.518.4 (SEQ ID NO:1457; FIG. 36AG).

[0069] In some embodiments, said anti-PVRIG antibody is selected from the group consisting of GSK4381562/SRF816 (GSK/Surface), NTX2R13 (Nectin Therapeutics), an anti-PVRIG antibody as described in WO 2017/041004, an anti-PVRIG antibody as described in WO2001008879, an anti-PVRIG antibody as described in WO2018017864, and an anti-PVRIG antibody as described in WO2118000205.

[0070] In some embodiments, the anti-TIGIT antibody is selected from the group consisting of CPA.9.083.H4(S241P) and CPA.9.086.H4(S241P).

[0071] In some embodiments, said anti-TIGIT antibody comprises: i) a heavy chain variable domain comprising the vhCDR1, vhCDR2, and vhCDR3 from CPA.9.083.H4(S241P) (SEQ ID NO:350) and ii) a light chain variable domain comprising the vlCDR1, vlCDR2, and vlCDR3 from CPA.9.083.H4(S241P) (SEQ ID NO:355).

[0072] In some embodiments, said anti-TIGIT antibody comprises: i) a heavy chain variable domain comprising the vhCDR1, vhCDR2, and vhCDR3 from CPA.9.086.H4(S241P) (SEQ ID NO:360) and ii) a light chain variable domain comprising the vlCDR1, vlCDR2, and vlCDR3 from CPA.9.086.H4(S241P) (SEQ ID NO:365).

[0073] In some embodiments, said anti-TIGIT antibody comprises: i) a heavy chain variable domain comprising the vhCDR1, vhCDR2, and vhCDR3 from CHA.9.547.18 (SEQ ID NO:1177; FIG. 34QQQQ) and ii) a light chain variable domain comprising the vlCDR1, vlCDR2, and vlCDR3 from CHA.9.547.18 (SEQ ID NO:1181; FIG. 34QQQQ).

[0074] In some embodiments, said anti-TIGIT antibody is selected from the group consisting of EOS-448 (GlaxoSmithKline, iTeos Therapeutics), BMS-986207, domvanalimab (AB154, Arcus Biosciences, Inc.), AB308 (Arcus Bioscience), Ociperlimab (aBGB-A1217, BeiGene), Tiragolumab (MTIG7192A, RocheGenentech), BAT6021 (Bio-Thera Solutions), BAT6005 (Bio-Thera Solutions), IBI939 (Innovent Biologics, US2021/00040201), JS006 (Junshi Bioscience/COHERUS), ASP8374 (Astellas Pharma Inc), Vibostolimab (MK-7684, Merck Sharp & Dohme), M6332 (Merck KGAA), Etigiliimab (OMP-313M32, Mereo BioPharma), SEA-TGT (Seagen)y, HB0030 (Huabo Biopharma), AK127 (AKESO), IBI939 (Innovent Biologics), and anti-TIGIT antibodies include the Genentech antibody (MTIG7192A).

[0075] In some embodiments, said anti-PD-1 antibody is selected from the group consisting of nivolumab (Opdivo®; BMS; CheckMate078), pembrolizumab (KEYTRUDA®; Merck), TSR-042 (Tesaro), cemiplimab (REGN2810; Regeneron Pharmaceuticals, see US20170174779), BMS-936559, Spartalizumab (PDR001, Novartis), pidilizumab (CT-011; Pfizer Inc), Tislelizumab (BGB-A317, BeiGene), Camrelizumab (SHR-1210, Incyte and Jiangsu HengRui), SHR-1210 (CTR20170299 and CTR20170322), SHR-1210 (CTR20160175 and CTR20170090), Sintilimab(Tyvyt®; Eli lily and Innovent Biologics), Toripalimab (JS001, Shanghai Junshi Bioscience), JS-001 (CTR20160274), IBI308 (CTR20160735), BGB-A317 (CTR20160872), Penpulimab (AK105, Akeso Biopharma), Zimberelimab (Arcus), BAT1306 (Bio-Thera Solutions Ltd), Sasanlimab (PF-06801591, pfizer), Dostarlimab-gxly (GlaxoSmithKline LLC), Prolgolimab (Biocad), Cadonilimab (Akeso Inc), Geptanolimab (Genor BioPharma Co Ltd), Serplulimab (Shanghai Henlius Biotech Inc), Balstilimab (Agenus Inc), Retifanlimab (Incyte Corp), Cetrelimab (Johnson & Johnson), CS-1003 (EQRx Inc), IBI-318 (Innovent Biologics Inc), Ivonescimab (Akeso Inc), Pucotenlimab (Lepu Biopharma Co Ltd), QL-1604 (Qilu Pharmaceutical Co Ltd), SCTI-10A (SinoCelltech Group Ltd), Tebotelimab (MacroGenics Inc), AZD-7789 (AstraZeneca Plc), Budigalimab (AbbVie Inc), EMB-02 (EpimAb Biotherapeutics Inc), Ezabenlimab (Boehringer Ingelheim International GmbH), F-520 (Shandong New Time Pharmaceutical Co Ltd), HX-009 (Waterstone Hanxbio Pty Ltd), Zeluvalimab (Amgen), Peresolimab (Eli Lilly and Co), Rosnilimab (AnaptysBio Inc), Vudalimab (Xencor), Izuralimab (Xencor), Lorigerlimab (MacroGenics Inc), YBL-006 (Y-Biologics Inc), and ONO-4685 (Ono Pharmaceutical Co Ltd), LY-3434172 (Eli Lilly and Co).

[0076] In some embodiments, said anti-PD-L1 antibody is selected from the group consisting of atezolizumab (TECENTRIQ®; MPDL3280A; IMpower110; Roche/Genentech), avelumab (BAVENCIO®; MSB001071 8C; EMID Serono & Pfizer), and Durvalumab (MEDI4736; IMFINZI®; AstraZeneca). And other antibodies under development, for example, Lodapolimab (LY3300054, Eli Lily), Pimivalimab (Jounce Therapeutics Inc), SHR-1316 (Jiangsu Hengrui Medicine Co Ltd), Envafolimab (Jiangsu Simcere Pharmaceutical Co Ltd), sugemalimab (CStone Pharmaceuticals Co Ltd), cosibelimab (Checkpoint Therapeutics Inc), pacmilimab (CytomX Therapeutics Inc), IBI-318, IBI-322, IBI-323 (Innovent Biologics Inc), INBRX-105 (Inhibrx Inc), KN-046 (Alphamab Oncology), 6MW-3211 (Mabwell Shanghai Bioscience Co Ltd), BNT-311 (BioNTech SE), FS-118 (F-star Therapeutics Inc), GNC-038 (Systimmune Inc), GR-1405 (Genrix (Shanghai) Biopharmaceutical Co Ltd), HS-636 (Zhejiang Hisun Pharmaceutical Co Ltd), LP-002 (Lepu Biopharma Co Ltd), PM-1003 (Biotheus Inc), PM-8001 (Biotheus Inc), STIA-1015 (ImmuneOncia Therapeutics LLC), ATG-101 (Antengene Corp Ltd), BJ-005 (BJ Bioscience Inc), CDX-527 (Celldex Therapeutics Inc), GNC-035 (Systimmune Inc), GNC-039(Systimmune Inc), HLX-20 (Shanghai Henlius Biotech Inc), JS-003 (Shanghai Junshi Bioscience Co Ltd), LY-3434172 (Eli Lilly and Co), MCLA-145 (Merus NV), MSB-2311 (Transcenta Holding Ltd), PF-07257876 (Pfizer Inc), Q-1802 (QureBio Ltd), QL-301 (QLSF Biotherapeutics Inc), QLF-31907 (Qilu Pharmaceutical Co Ltd), RC-98 (RemeGen Co Ltd), TST-005 (Transcenta Holding Ltd), Atezolizumab (IMpower133), BMS-936559/MDX-1105, and/or RG-7446/MPDL3280A, and YW243.55.S70.

[0077] In some embodiments, said anti-IL18-BP antibody and the second antibody are administered sequentially or simultaneously, in any order, and in one or more formulations.

[0078] In some embodiments, said anti-IL18-BP antibody is for use in combination with an immunostimulatory antibody, a cytokine therapy, an immunomodulatory drug, cytotoxic agents, chemotherapeutic agents, growth inhibitory agents, anti-hormonal agents, kinase inhibitors, anti-angiogenic agents, cardioprotectants, immunosuppressive agents, agents that promote proliferation of hematological cells, angiogenesis inhibitors, protein tyrosine kinase (PTK) inhibitors, or other therapeutic agents.

[0079] In some embodiments, the method further comprises administering one or more inflammasome activators.

[0080] In some embodiments, said inflammasome activator is a chemotherapy agent.

[0081] In some embodiments, said chemotherapy agent is selected from the group consisting of Platinum (including Platinum chemotherapy agent), Paclitaxel (taxol), Sorafenib, Doxorubicin, Sorafenib, 5-FU, Gemcitabine, and Irinotecan (CPT-11).

[0082] In some embodiments, said Platinum chemotherapy agent is Oxaliplatin or Cisplatin.

[0083] In some embodiments, said inflammasome activator is a CD39 inhibitor.

[0084] In some embodiments, said CD39 inhibitor is an anti-CD39 antibody.

[0085] In some embodiments, said anti-IL18-BP antibody and the immunostimulatory antibody, cytokine therapy, immunomodulatory drug, cytotoxic agents, chemotherapeutic agents, growth inhibitory agents, anti-hormonal agents, kinase inhibitors, anti-angiogenic agents, cardioprotectants, immunosuppressive agents, agents that promote proliferation of hematological cells, angiogenesis inhibitors, protein tyrosine kinase (PTK) inhibitors, or other therapeutic agents are administered sequentially or simultaneously, in any order, and in one or more formulations.

[0086] In some embodiments, said cancer is selected from the group consisting of vascularized tumors, melanoma, non-melanoma skin cancer (squamous and basal cell carcinoma), mesothelioma, squamous cell cancer, lung cancer, small-cell lung cancer, non-small cell lung cancer, neuroendocrine lung cancer (including pleural mesothelioma, neuroendocrine lung carcinoma), NSCL (large cell), NSCLC large cell adenocarcinoma, non-small cell lung carcinoma (NSCLC), NSCLC squamous cell, soft-tissue sarcoma, Kaposi's sarcoma, adenocarcinoma of the lung, squamous carcinoma of the lung, NSCLC with PDL1>=50% TPS, neuroendocrine lung carcinoma, atypical carcinoid lung cancer, cancer of the peritoneum, esophageal cancer, hepatocellular cancer, liver cancer (including HCC), gastric cancer, stomach cancer (including gastrointestinal cancer), pancreatic cancer, glioblastoma, cervical cancer, ovarian cancer, urothelial cancer, bladder cancer, hepatoma, glioma, brain cancer (as well as edema, such as that associated with brain tumors), breast cancer (including, for example, triple negative breast cancer), testis cancer, testicular germ cell tumors, colon cancer, colorectal cancer (CRC), colorectal cancer MSS (MSS-CRC); refractory MSS colorectal; MSS (microsatellite stable status), primary peritoneal cancer, primary peritoneal ovarian carcinoma, microsatellite stable primary peritoneal cancer, platinum resistant microsatellite stable primary peritoneal cancer, CRC (MSS unknown), rectal cancer, endometrial cancer (including endometrial carcinoma), uterine carcinoma, salivary gland carcinoma, kidney cancer, renal cell cancer (RCC), renal cell carcinoma (RCC), gastro-esophageal junction cancer, prostate cancer, vulval cancer, thyroid cancer, hepatic carcinoma, carcinoid carcinoma, head and neck cancer, B-cell lymphoma (including non-Hodgkin's lymphoma, as well as low grade/follicular non-Hodgkin's lymphoma (NHL), small lymphocytic (SL) NHL, intermediate grade/follicular NHL, intermediate grade diffuse NHL, Diffuse Large B cell lymphoma, high grade immunoblastic NHL, high grade lymphoblastic NHL, high grade small non-cleaved cell NHL, bulky disease NHL, mantle cell lymphoma, AIDS-related lymphoma, and Waldenstrom's Macroglobulinemia, Hodgkin's lymphoma (HD), chronic lymphocytic leukemia (CLL), acute lymphoblastic leukemia (ALL), T cell Acute Lymphoblastic Leukemia (T-ALL), Acute myeloid leukemia (AML), Hairy cell leukemia, chronic myeloblastic leukemia, multiple myeloma, post-transplant lymphoproliferative disorder (PTLD), abnormal vascular proliferation associated with phakomatoses, Meigs' syndrome, Merkel Cell cancer, MSI-high cancer, KRAS mutant tumors, adult T-cell leukemia/lymphoma, adenoid cystic cancer (including adenoid cystic carcinoma), melanoma, malignant melanoma, metastatic melanoma, pancreatic cancer, pancreatic adenocarcinoma, ovarian cancer (including ovarian carcinoma), pleural mesothelioma, cervical squamous cell carcinoma (cervical SCC), anal squamous cell carcinoma (anal SCC), carcinoma of unknown primary, gallbladder cancer, pleural mesothelioma, chordoma, endometrial sarcoma, chondrosarcoma, uterine sarcoma, uveal melanoma, amyloidosis, AL-amyloidosis, astrocytoma, and Myelodysplastic syndromes (MDS).

[0087] In some embodiments, said cancer is selected from the group consisting of renal clear cell carcinoma (RCC), lung cancer, NSCLC, lung adenocarcinoma, lung squamous cell carcinoma, gastric adenocarcinoma, ovarian cancer, endometrial cancer, breast cancer, triple negative breast cancer (TNBC), head and neck tumor, colorectal adenocarcinoma, melanoma, and metastatic melanoma.

[0088] In some embodiments, the anti-IL18-BP antibody comprises a composition comprising an anti-IL18-BP antibody for activating T cells, NK cells, NKT cells, Dendritic cells, MAIT T cells, y6 T cells, and/or innate lymphoid cells (ILCs), and/or modulating Myeloid cells, for use in the treatment of cancer, wherein the antibody antagonizes at least one immune inhibitory effect of IL18-BP, optionally wherein the anti-IL18-BP antibody blocks the IL18: IL18-BP binding interaction, optionally wherein the anti-IL18-BP antibody exhibits a binding affinity or K_{D} of lower than 1 pM.

[0089] In some embodiments, the anti-IL18-BP antibody competes for binding with an antibody that binds to human IL18-BP of SEQ ID NO:254 and/or the secreted chain of human IL18-BP of SEQ ID NO:255 and/or that competes for binding to IL18.

[0090] In some embodiments, the anti-IL18-BP antibody competes for binding with an antibody as described in U.S. Pat. No. 8,436,148, WO2019213686, WO200107480. WO2019051015, WO2014126277A1, WO2012177595, US20140364341, and/or WO2018060447.

[0091] In some embodiments, the anti-IL18-BP antibody comprises: the vhCDR1, vhCDR2, vhCDR3, vlCDR1, vlCDR2 and vlCDR3 sequences selected from the group consisting of:
[0092] i. the vhCDR1 (SEQ ID NO: 1), vhCDR2 (SEQ ID NO: 32), vhCDR3 (SEQ ID NO: 3), vlCDR1 (SEQ ID NO: 4), vlCDR2 (SEQ ID NO: 5) and vlCDR3 (SEQ ID NO: 6) sequences of FIG. 1A (66650);
[0093] ii. the vhCDR1 (SEQ ID NO: 7), vhCDR2 (SEQ ID NO: 8), vhCDR3 (SEQ ID NO: 9), vlCDR1 (SEQ ID NO: 10), vlCDR2 (SEQ ID NO: 11) and vlCDR3 (SEQ ID NO: 12) sequences of FIG. 1B (66670);
[0094] iii. the vhCDR1 (SEQ ID NO: 13), vhCDR2 (SEQ ID NO: 14), vhCDR3 (SEQ ID NO: 15), vlCDR1 (SEQ ID NO: 16), vlCDR2 (SEQ ID NO: 17) and vlCDR3 (SEQ ID NO: 18) sequences of FIG. 1C (66692);
[0095] iv. the vhCDR1 (SEQ ID NO: 19), vhCDR2 (SEQ ID NO: 20), vhCDR3 (SEQ ID NO: 21), vlCDR1 (SEQ ID NO: 22), vlCDR2 (SEQ ID NO: 23) and vlCDR3 (SEQ ID NO: 24) sequences of FIG. 1D (66716);
[0096] v. the vhCDR1 (SEQ ID NO: 25), vhCDR2 (SEQ ID NO: 26), vhCDR3 (SEQ ID NO: 27), vlCDR1 (SEQ ID NO: 28), vlCDR2 (SEQ ID NO: 29) and vlCDR3 (SEQ ID NO: 30) sequences of FIG. 1E (66650);
[0097] vi. the vhCDR1 (SEQ ID NO: 31), vhCDR2 (SEQ ID NO: 32), vhCDR3 (SEQ ID NO: 33), vlCDR1 (SEQ ID NO: 34), vlCDR2 (SEQ ID NO: 35) and vlCDR3 (SEQ ID NO: 36) sequences of FIG. 1F (66670);
[0098] vii. the vhCDR1 (SEQ ID NO: 37), vhCDR2 (SEQ ID NO: 38), vhCDR3 (SEQ ID NO: 39), vlCDR1 (SEQ ID NO: 40), vlCDR2 (SEQ ID NO: 41) and vlCDR3 (SEQ ID NO: 42) sequences of FIG. 1G (66692);
[0099] viii. the vhCDR1 (SEQ ID NO: 43), vhCDR2 (SEQ ID NO: 44), vhCDR3 (SEQ ID NO: 45), vlCDR1 (SEQ ID NO: 46), vlCDR2 (SEQ ID NO: 47) and vlCDR3 (SEQ ID NO: 48) sequences of FIG. 1H (66716);
[0100] ix. the vhCDR1 (SEQ ID NO: 844), vhCDR2 (SEQ ID NO: 845), vhCDR3 (SEQ ID NO: 846), vlCDR1 (SEQ ID NO: 847), vlCDR2 (SEQ ID NO: 848) and vlCDR3 (SEQ ID NO: 849) sequences of FIG. 1I(66650);
[0101] x. the vhCDR1 (SEQ ID NO: 850), vhCDR2 (SEQ ID NO: 851), vhCDR3 (SEQ ID NO: 852), vlCDR1 (SEQ ID NO: 853), vlCDR2 (SEQ ID NO: 854) and vlCDR3 (SEQ ID NO: 855) sequences of FIG. 1J (66670);
[0102] xi. the vhCDR1 (SEQ ID NO: 856), vhCDR2 (SEQ ID NO: 857), vhCDR3 (SEQ ID NO: 858), vlCDR1 (SEQ ID NO: 859), vlCDR2 (SEQ ID NO: 860) and vlCDR3 (SEQ ID NO: 861) sequences of FIG. 1K (66692);
[0103] xii. the vhCDR1 (SEQ ID NO: 862), vhCDR2 (SEQ ID NO: 863), vhCDR3 (SEQ ID NO: 864), vlCDR1 (SEQ ID NO: 865), vlCDR2 (SEQ ID NO: 866) and vlCDR3 (SEQ ID NO: 867) sequences of FIG. 1L (66716);
[0104] xiii. the vhCDR1 (SEQ ID NO: 55), vhCDR2 (SEQ ID NO: 56), vhCDR3 (SEQ ID NO: 57), vlCDR1 (SEQ ID NO: 60), vlCDR2 (SEQ ID NO: 61) and vlCDR3 (SEQ ID NO: 62) sequences of FIG. 2A (71709);
[0105] xiv. the vhCDR1 (SEQ ID NO: 65), vhCDR2 (SEQ ID NO: 66), vhCDR3 (SEQ ID NO: 67), vlCDR1 (SEQ ID NO: 70), vlCDR2 (SEQ ID NO: 71) and vlCDR3 (SEQ ID NO: 72) sequences of FIG. 2B (71719);
[0106] xv. the vhCDR1 (SEQ ID NO: 75), vhCDR2 (SEQ ID NO: 76), vhCDR3 (SEQ ID NO: 77), vlCDR1 (SEQ ID NO: 80), vlCDR2 (SEQ ID NO: 81) and vlCDR3 (SEQ ID NO: 82) sequences of FIG. 2C (71720);
[0107] xvi. the vhCDR1 (SEQ ID NO: 85), vhCDR2 (SEQ ID NO: 86), vhCDR3 (SEQ ID NO: 87), vlCDR1 (SEQ ID NO: 90), vlCDR2 (SEQ ID NO: 91) and vlCDR3 (SEQ ID NO: 92) sequences of FIG. 2D (71722);
[0108] xvii. the vhCDR1 (SEQ ID NO: 95), vhCDR2 (SEQ ID NO: 96), vhCDR3 (SEQ ID NO: 97), vlCDR1 (SEQ ID NO: 100), vlCDR2 (SEQ ID NO: 101) and vlCDR3 (SEQ ID NO: 102) sequences of FIG. 2E (71701);
[0109] xviii. the vhCDR1 (SEQ ID NO: 105), vhCDR2 (SEQ ID NO: 106), vhCDR3 (SEQ ID NO: 107), vlCDR1 (SEQ ID NO: 110), vlCDR2 (SEQ ID NO: 111) and vlCDR3 (SEQ ID NO: 112) sequences of FIG. 2F (71663);
[0110] xix. the vhCDR1 (SEQ ID NO: 115), vhCDR2 (SEQ ID NO: 116), vhCDR3 (SEQ ID NO: 117), vlCDR1 (SEQ ID NO: 120), vlCDR2 (SEQ ID NO: 121) and vlCDR3 (SEQ ID NO: 122) sequences of FIG. 2G (71662);
[0111] xx. the vhCDR1 (SEQ ID NO: 125), vhCDR2 (SEQ ID NO: 126), vhCDR3 (SEQ ID NO: 127), vlCDR1 (SEQ ID NO: 130), vlCDR2 (SEQ ID NO: 131) and vlCDR3 (SEQ ID NO: 132) sequences of FIG. 2H (66692);
[0112] xxi. the vhCDR1 (SEQ ID NO: 135), vhCDR2 (SEQ ID NO: 136), vhCDR3 (SEQ ID NO: 137), vlCDR1 (SEQ ID NO: 140), vlCDR2 (SEQ ID NO: 141) and vlCDR3 (SEQ ID NO: 142) sequences of FIG. 21 (71710);
[0113] xxii. the vhCDR1 (SEQ ID NO: 145), vhCDR2 (SEQ ID NO: 146), vhCDR3 (SEQ ID NO: 147), vlCDR1 (SEQ ID NO: 150), vlCDR2 (SEQ ID NO: 151) and vlCDR3 (SEQ ID NO: 152) sequences of FIG. 2J (71717);
[0114] xxiii. the vhCDR1 (SEQ ID NO: 155), vhCDR2 (SEQ ID NO: 156), vhCDR3 (SEQ ID NO: 157), vlCDR1 (SEQ ID NO: 160), vlCDR2 (SEQ ID NO: 161) and vlCDR3 (SEQ ID NO: 162) sequences of FIG. 2K (71739);
[0115] xxiv. the vhCDR1 (SEQ ID NO: 165), vhCDR2 (SEQ ID NO: 166), vhCDR3 (SEQ ID NO: 167), vlCDR1 (SEQ ID NO: 170), vlCDR2 (SEQ ID NO: 171) and vlCDR3 (SEQ ID NO: 172) sequences of FIG. 2L (71736);
[0116] xxv. the vhCDR1 (SEQ ID NO: 175), vhCDR2 (SEQ ID NO: 176), vhCDR3 (SEQ ID NO: 177), vlCDR1 (SEQ ID NO: 180), vlCDR2 (SEQ ID NO: 181) and vlCDR3 (SEQ ID NO: 182) sequences of FIG. 2M (71707);
[0117] xxvi. the vhCDR1 (SEQ ID NO: 185), vhCDR2 (SEQ ID NO: 186), vhCDR3 (SEQ ID NO: 187), vlCDR1 (SEQ ID NO: 190), vlCDR2 (SEQ ID NO: 191) and vlCDR3 (SEQ ID NO: 192) sequences of FIG. 2N (66716);
[0118] xxvii. the vhCDR1 (SEQ ID NO: 195), vhCDR2 (SEQ ID NO: 196), vhCDR3 (SEQ ID NO: 197), vlCDR1 (SEQ ID NO: 200), vlCDR2 (SEQ ID NO: 201) and vlCDR3 (SEQ ID NO: 202) sequences of FIG. 2O (71728);
[0119] xxviii. the vhCDR1 (SEQ ID NO: 205), vhCDR2 (SEQ ID NO: 206), vhCDR3 (SEQ ID NO: 207), vlCDR1 (SEQ ID NO: 210), vlCDR2 (SEQ ID NO: 211) and vlCDR3 (SEQ ID NO: 212) sequences of FIG. 2P (71741);
[0120] xxix. the vhCDR1 (SEQ ID NO: 215), vhCDR2 (SEQ ID NO: 216), vhCDR3 (SEQ ID NO: 217), vlCDR1 (SEQ ID NO: 220), vlCDR2 (SEQ ID NO: 221) and vlCDR3 (SEQ ID NO: 222) sequences of FIG. 2Q (71742);
[0121] xxx. the vhCDR1 (SEQ ID NO: 225), vhCDR2 (SEQ ID NO: 226), vhCDR3 (SEQ ID NO: 227), vlCDR1 (SEQ ID NO: 230), vlCDR2 (SEQ ID NO: 231) and vlCDR3 (SEQ ID NO: 232) sequences of FIG. 2R (71744);
[0122] xxxi. the vhCDR1 (SEQ ID NO: 235), vhCDR2 (SEQ ID NO: 236), vhCDR3 (SEQ ID NO: 237), vlCDR1 (SEQ ID NO: 240), vlCDR2 (SEQ ID NO: 241) and vlCDR3 (SEQ ID NO: 242) sequences of FIG. 2S (71753); and
[0123] xxxii. the vhCDR1 (SEQ ID NO: 245), vhCDR2 (SEQ ID NO: 246), vhCDR3 (SEQ ID NO: 247), vlCDR1 (SEQ ID NO: 250), vlCDR2 (SEQ ID NO: 251) and vlCDR3 (SEQ ID NO: 252) sequences of FIG. 2T (71755).

[0124] In some embodiments, the anti-IL18-BP antibody comprises the heavy chain variable domain and the light chain variable domain of an antibody selected from the group consisting of
[0125] i. the heavy chain variable domain (SEQ ID NO: 54) and the light chain variable domain (SEQ ID NO: 59) of FIG. 2A (71709);
[0126] ii. the heavy chain variable domain (SEQ ID NO: 64) and the light chain variable domain (SEQ ID NO: 69) of FIG. 2B (71719);
[0127] iii. the heavy chain variable domain (SEQ ID NO: 74) and the light chain variable domain (SEQ ID NO: 79) of FIG. 2C (71720);
[0128] iv. the heavy chain variable domain (SEQ ID NO: 84) and the light chain variable domain (SEQ ID NO: 89) of FIG. 2D (71722);
[0129] v. the heavy chain variable domain (SEQ ID NO: 94) and the light chain variable domain (SEQ ID NO: 99) of FIG. 2E (71701);
[0130] vi. the heavy chain variable domain (SEQ ID NO: 104) and the light chain variable domain (SEQ ID NO: 109) of FIG. 2F (71663);
[0131] vii. the heavy chain variable domain (SEQ ID NO: 114) and the light chain variable domain (SEQ ID NO: 119) of FIG. 2G (71662);
[0132] viii. the heavy chain variable domain (SEQ ID NO: 124) and the light chain variable domain (SEQ ID NO: 129) of FIG. 2H (66692);
[0133] ix. the heavy chain variable domain (SEQ ID NO: 134) and the light chain variable domain (SEQ ID NO: 139) of FIG. 21 (71710);
[0134] x. the heavy chain variable domain (SEQ ID NO: 144) and the light chain variable domain (SEQ ID NO: 149) of FIG. 2J (71717);
[0135] xi. the heavy chain variable domain (SEQ ID NO: 154) and the light chain variable domain (SEQ ID NO: 159) of FIG. 2K (71739);
[0136] xii. the heavy chain variable domain (SEQ ID NO: 164) and the light chain variable domain (SEQ ID NO: 169) of FIG. 2L (71736);
[0137] xiii. the heavy chain variable domain (SEQ ID NO: 174) and the light chain variable domain (SEQ ID NO: 179) of FIG. 2M (71707);
[0138] xiv. the heavy chain variable domain (SEQ ID NO: 184) and the light chain variable domain (SEQ ID NO: 189) of FIG. 2N (66716);
[0139] xv. the heavy chain variable domain (SEQ ID NO: 194) and the light chain variable domain (SEQ ID NO: 199) of FIG. 2O (71728);
[0140] xvi. the heavy chain variable domain (SEQ ID NO: 204) and the light chain variable domain (SEQ ID NO: 209) of FIG. 2P (71741);
[0141] xvii. the heavy chain variable domain (SEQ ID NO: 214) and the light chain variable domain (SEQ ID NO: 219) of FIG. 2Q (71742);
[0142] xviii. the heavy chain variable domain (SEQ ID NO: 224) and the light chain variable domain (SEQ ID NO: 229) of FIG. 2R (71744);
[0143] xix. the heavy chain variable domain (SEQ ID NO: 234) and the light chain variable domain (SEQ ID NO: 239) of FIG. 2S (71753); and
[0144] xx. the heavy chain variable domain (SEQ ID NO: 244) and the light chain variable domain (SEQ ID NO: 249) of FIG. 2T (71755).

[0145] In some embodiments, the anti-IL18-BP antibody comprises a CH1-hinge-CH2-CH3 region from human IgG1, IgG2, IgG3, or IgG4, wherein said hinge region optionally comprises mutations.

[0146] In some embodiments, the anti-IL18-BP antibody comprises the CH1-hinge-CH2-CH3 region from human IgG4.

[0147] In some embodiments, said hinge region comprises mutations.

[0148] In some embodiments, the anti-IL18-BP antibody comprises a CL region of human kappa 2 light chain.

[0149] In some embodiments, the anti-IL18-BP antibody comprises a CL region of human lambda 2 light chain.

[0150] In some embodiments, the anti-IL18-BP antibody comprises:
[0151] i. a heavy chain variable domain, comprising:
   [0152] a) CDR-H1 having the sequence Y-T-F-X-X2-Y-A-X3-H, wherein X is N, R, D, G or K; X2 is S, H, I or Q; X3 is M or V;
   [0153] b) CDR-H2 having the sequence W-I-H-A-G-T-G-X-T-X2-Y-S-Q-K-F-Q-G, wherein X is N, A or V; X2 is K or LW-I-H; and
   [0154] c) CDR-H3 having the sequence A-R-G-L-G-X-V-G-P-T-G-T-S-W-F-D-P, wherein X is S or E; and
[0155] ii. a light chain variable domain, comprising:
   [0156] a) CDR-L1 having the sequence R-A-S-Q-G-I-S-S-W-L-A;
   [0157] b) CDR-L2 having the sequence E-A-S-S-L-E-S; and
   [0158] c) CDR-L3 having the sequence Q-Q-Y-R-X-X2-P-F-T, wherein X is S, V, Y, L or Q; X2 is F, S or G.

[0159] In some embodiments, the anti-IL18-BP antibody comprises:
[0160] i. a heavy chain variable domain, comprising:
   [0161] a) CDR-H1 having the sequence G-T-F-X-X2-Y-X3-I-S, wherein X is S or N; X2 is E or S; X3 is V or P
   [0162] b) CDR-H2 having the sequence G-I-I-P-X-X2-G-T-A-X3-Y-A-Q-K-F-Q-G, wherein X is G or Y; X2 is A or S; X3 is N, I, or V; and
   [0163] c) CDR-H3 having the sequence A-R-G-R-H-X-H-E-T, wherein X is S, G or F; and
[0164] ii. a light chain variable domain, comprising:
   [0165] a) CDR-L1 having the sequence R-A-S-Q-G-I-S-S-W-L-A
   [0166] b) CDR-L2 having the sequence A-A-S-S-L-Q-S
   [0167] c) CDR-L3 having the sequence Q-Q-V-Y-X-X2-P-W-T, wherein X is S or R; X2 is L I, or F-.

[0168] In some embodiments, the anti-IL18-BP antibody comprises:
[0169] i. a heavy chain variable domain, comprising:
   [0170] a) CDR-H1 having the sequence F-T-F-X-N-X2-A-M-S, wherein X is G or D or S; X2 is T or V or Y;
   [0171] b) a CDR-H2 having the sequence A-I-S-X-X1-X2-G-S-T-Y-Y-A-D-S-V-K-G, wherein X is G or A; X2 is N or S; X3 is A or G; and
   [0172] c) a CDR-H3 having the sequence A-K-G-P-D-R-Q-V-F-D-Y; and
[0173] ii. a light chain variable domain, comprising:
   [0174] a) a CDR-L1 having the sequence R-A-S-Q-G-I-X-S-W-L-A, wherein X is S or D;
   [0175] b) a CDR-L2 having the sequence A-A-S-S-L-Q-S; and
   [0176] c) a CDR-L3 having the sequence Q-H-A-X-X1-F-P-Y-T, wherein X is Y or L; X1 is S or F.

[0177] In some embodiments, the anti-IL18-BP antibody comprises:
[0178] i. a heavy chain variable domain, comprising:
   [0179] a) CDR-H1 having the sequence G-S-I-S-S-X-X2-Y-X3-W-G, wherein X is S or P; X2 is E or D; X3 is G, Y, or P;
   [0180] b) CDR-H2 having the sequence S-I-X-X2-X3-G-X4-T-Y-Y-N-P-S-L-K-S, wherein X is Y or V; X2 is Y or N; X3 is Q or S; X4 is S or A; and
   [0181] c) CDR-H3 having the sequence A-R-G-P-X-R-Q-X2-F-D-Y, wherein X is Y or H, X2 is V or L; and
[0182] ii. a light chain variable domain, comprising:
   [0183] a) CDR-L1 having the sequence R-A-S-Q-G-I-S-S-W-L-A
   [0184] b) CDR-L2 having the sequence A-A-S-S-L-Q-S
   [0185] c) CDR-L3 having the sequence Q-Q-G-X-X2-F-P-Y-T, wherein X is S or F; X2 is S or V.

[0186] In some embodiments, the anti-IL18-BP antibody comprises:
[0187] i. a heavy chain variable domain, comprising:
   [0188] a) CDR-H1 having the sequence Y-T-F-X-X2-Y-A-X3-H, wherein X is any amino acid; X2 is any amino acid; X3 is any amino acid;
   [0189] b) CDR-H2 having the sequence W-I-H-A-G-T-G-X-T-X2-Y-S-Q-K-F-Q-G, wherein X is any amino acid; X2 is any amino acid; and
   [0190] c) CDR-H3 having the sequence A-R-G-L-G-X-V-G-P-T-G-T-S-W-F-D-P, wherein X is any amino acid; and
[0191] ii. a light chain variable domain, comprising:
   [0192] a) CDR-L1 having the sequence R-A-S-Q-G-I-S-S-W-L-A;
   [0193] b) CDR-L2 having the sequence E-A-S-S-L-E-S; and
   [0194] c) CDR-L3 having the sequence Q-Q-Y-R-X-X2-P-F-T, wherein X is any amino acid; X2 is any amino acid.

[0195] In some embodiments, the anti-IL18-BP antibody comprises:
[0196] i. a heavy chain variable domain, comprising:
   [0197] a) CDR-H1 having the sequence G-T-F-X-X2-Y-X3-I-S, wherein X is any amino acid; X2 is any amino acid; X3 is any amino acid;
   [0198] b) CDR-H2 having the sequence G-I-I-P-G-X2-G-T-A-X3-Y-A-Q-K-F-Q-G, wherein X is any amino acid; X2 is any amino acid; X3 is any amino acid; and
   [0199] c) CDR-H3 having the sequence A-R-G-R-H-X-H-E-T, wherein X is any amino acid; and
[0200] ii. a light chain variable domain, comprising:
   [0201] a) CDR-L1 having the sequence R-A-S-Q-G-I-S-S-W-L-A;
   [0202] b) CDR-L2 having the sequence A-A-S-S-L-Q-S; and
   [0203] c) CDR-L3 having the sequence Q-Q-V-Y-X-X2-P-W-T, wherein X is any amino acid; X2 is any amino acid.

[0204] In some embodiments, the anti-IL18-BP antibody comprises:
[0205] i. a heavy chain variable domain, comprising:
   [0206] a) CDR-H1 having the sequence F-T-F-X-N-X2-A-M-S, wherein X is any amino acid; X2 is any amino acid;
   [0207] b) CDR-H2 having the sequence A-I-S-X-X1-X2-G-S-T-Y-Y-A-D-S-V-K-G, wherein X is any amino acid; X2 is any amino acid; X3 is any amino acid; and
   [0208] c) CDR-H3 having the sequence A-K-G-P-D-R-Q-V-F-D-Y;
[0209] ii. a light chain variable domain, comprising:
   [0210] a) CDR-L1 having the sequence R-A-S-Q-G-I-X-S-W-L-A, wherein X is any amino acid;
   [0211] b) CDR-L2 having the sequence A-A-S-S-L-Q-S; and
   [0212] c) CDR-L3 having the sequence Q-H-A-X-X1-F-P-Y-T, wherein X is any amino acid; X2 is any amino acid.

[0213] In some embodiments, the anti-IL18-BP antibody comprises:
[0214] i. a heavy chain variable domain, comprising:
   [0215] a) CDR-H1 having the sequence G-S-I-S-S-X-X2-Y-X3-W-G, wherein X is any amino acid; X2 is any amino acid; X3 is any amino acid;
   [0216] b) CDR-H2 having the sequence S-I-X-X2-X3-G-X4-T-Y-Y-N-P-S-L-K-S, wherein X is any amino acid; X2 is any amino acid; X3 is any amino acid; X4 is any amino acid; and
   [0217] c) CDR-H3 having the sequence A-R-G-P-X-R-Q-X2-F-D-Y, wherein X is any amino acid, X2 is any amino acid; and
[0218] ii. a light chain variable domain, comprising:
   [0219] a) CDR-L1 having the sequence R-A-S-Q-G-I-S-S-W-L-A;
   [0220] b) CDR-L2 having the sequence A-A-S-S-L-Q-S; and
   [0221] c) CDR-L3 having the sequence Q-Q-G-X-X2-F-P-Y-T, wherein X is any amino acid; X2 is any amino acid.

[0222] In some embodiments, the anti-IL18-BP antibody comprises:
[0223] i. a heavy chain variable domain, comprising:
   [0224] a) CDR-H1 having the sequence Y-T-F-X-X2-Y-A-X3-H, wherein X is N, R, D, G, T, Q, S, A or K; X2 is S, H, I, N, L, Y or Q; X3 is M or V;
   [0225] b) CDR-H2 having the sequence X-I-X2-A-G-X3-X4-X5-T-X6-Y-S-Q-K-F-Q-G, wherein X is W or Y; X2 is H or N; X3 is S, T or A; X4 is G or A; X5 is N, A, T or V; X6 is E, K or L; and
   [0226] c) CDR-H3 having the sequence A-R-G-L-G-X-V-G-P-T-G-T-S-W-F-D-P, wherein X is S, L, A, K or E; and
[0227] ii. a light chain variable domain, comprising:
   [0228] a) CDR-L1 having the sequence R-A-S-Q-G-I-S-S-W-L-A;
   [0229] b) CDR-L2 having the sequence E-A-S-S-E-S, wherein X is L or S; and
   [0230] c) CDR-L3 having the sequence Q-Q-Y-R-X-X2-P-F-T, wherein X is S, V, Y, L, T or Q; X2 is F, S, Y or G.

[0231] In some embodiments, the anti-IL18-BP antibody comprises:
[0232] i. a heavy chain variable domain, comprising:
   [0233] a) CDR-H1 having the sequence G-T-F-X-X2-Y-X3-I-S, wherein X is S or N; X2 is E or S; X3 is V or P
   [0234] b) CDR-H2 having the sequence G-I-I-P-X-X2-G-T-A-X3-Y-A-Q-K-F-Q-G, wherein X is G, S, I or Y; X2 is A, V or S; X3 is N, I or V; and
   [0235] c) CDR-H3 having the sequence A-R-G-R-H-X-H-E-T, wherein X is S, G, or F; and
[0236] ii. a light chain variable domain, comprising:
   [0237] a) CDR-L1 having the sequence R-A-S-Q-G-I-S-S-W-L-A;
   [0238] b) CDR-L2 having the sequence A-A-S-S-L-Q-S; and
   [0239] c) CDR-L3 having the sequence Q-Q-X-Y-X2-X3-P-W-T, wherein X is V or L; X2 is S or R; X3 is L, I or F.

[0240] In some embodiments, the anti-IL18-BP antibody comprises:
[0241] i. a heavy chain variable domain, comprising:
   [0242] a) CDR-H1 having the sequence F-T-F-X-X2-X3-X4-M-S, wherein X is G, S, P or D or S; X2 is N, S or P; X3 is T, V or Y; X4 is A, H or I;
   [0243] b) a CDR-H2 having the sequence A-I-S-X-X2-X3-X4-X5-T-X6-Y-A-D-S-V-K-G, wherein X is G or A; X2 is N, T, E or S; X3 is A or G; X4 is A or G; X5 is S or G; X6 is Y or F; and
   [0244] c) a CDR-H3 having the sequence A-K-G-P-D-R-Q-V-F-D-Y; and
[0245] ii. a light chain variable domain, comprising:
   [0246] a) a CDR-L1 having the sequence R-A-S-Q-G-I-X-S-W-L-A, wherein X is S or D;
   [0247] b) a CDR-L2 having the sequence A-A-S-S-L-Q-S; and
   [0248] c) a CDR-L3 having the sequence Q-H-X-X2-X3-F-P-Y-T, wherein X is A or G; X2 is Y, R or L; X3 is S, R, L or F.

[0249] In some embodiments, the anti-IL18-BP antibody comprises:
[0250] i. a heavy chain variable domain, comprising:
   [0251] a) CDR-H1 having the sequence G-S-I-X-S-X2-X3-Y-X4-W-X5, wherein X is S or F; X2 is S or P; X3 is E or D; X4 is G, P or Y; X5 is G or S;
   [0252] b) CDR-H2 having the sequence X-I-X2-X3-X4-G-X5-T-Y-Y-N-P-S-L-K-S, wherein X is S or V; X2 is Y, V, F or A; X3 is Y, F or N; X4 is Q, A or S; X5 is S, A or N; and
   [0253] c) CDR-H3 having the sequence A-R-G-P-X-R-Q-X2-F-D-Y, wherein X is Y, H or F; X2 is V or L; and
[0254] ii. a light chain variable domain, comprising:
   [0255] a) CDR-L1 having the sequence R-A-S-Q-G-I-S-S-W-L-A;
   [0256] b) CDR-L2 having the sequence A-A-S-S-L-Q-S; and
   [0257] c) CDR-L3 having the sequence Q-Q-G-X-X2-F-P-Y-T, wherein X is S N, W or F; X2 is S or V.

[0258] In some embodiments, the anti-IL18-BP antibody comprises:
[0259] i) the vhCDR1, vhCDR2, and vhCDR3 from VH1-03.66650, VH1-69.66670, VH3-23.66692, or VH1-39.66716; and
[0260] ii) the vlCDR1, vlCDR2, and vlCDR3 from VH1-03.66650, VH1-69.66670, VH3-23.66692, or VH1-39.66716, the vlCDR1, vlCDR2, and vlCDR3 from VH1-03.66650, VH1-69.66670, VH3-23.66692, or VH1-39.66716.

[0261] In some embodiments, the anti-IL18-BP antibody comprises:
[0262] i) the vhCDR1, vhCDR2, and vhCDR3 from VH1-03.66650, VH1-69.66670, VH3-23.66692, VH1-39.66716, ADI-71663, ADI-71662, ADI-66692, ADI-71701, ADI-71709, ADI-71710, ADI-71707, ADI-71717, ADI-71719, ADI-71220, ADI-71722, ADI-71736, ADI-71739, ADI-71728, ADI-66716, ADI-71741, ADI-71742, ADI-71744, ADI-71753, or ADI-71755; and
[0263] ii) the vlCDR1, vlCDR2, and vlCDR3 from VL-kappa-1-5, VL-kappa-1-12, ADI-71663, ADI-71662, ADI-66692, ADI-71701, ADI-71709, ADI-71710, ADI-71707, ADI-71717, ADI-71719, ADI-71220, ADI-71722, ADI-71736, ADI-71739, ADI-71728, ADI-66716, ADI-71741, ADI-71742, ADI-71744, ADI-71753, or ADI-71755;
   wherein optionally the CDRs comprise from 0 to 4 substitutions and wherein no individual CDR comprises more than 1 substitution, and wherein the vhCDR3 and vlCDR3 comprise no substitutions.

[0264] In some embodiments, the anti-IL18-BP antibody comprises:
[0265] i) a heavy chain variable domain comprising a sequence exhibiting at least 90%, at least 95%, or at least 98% identity to the heavy chain variable domain from ADI-71663, ADI-71662, ADI-66692, ADI-71701, ADI-71709, ADI-71710, ADI-71707, ADI-71717, ADI-71719, ADI-71220, ADI-71722, ADI-71736, ADI-71739, ADI-71728, ADI-66716, ADI-71741, ADI-71742, ADI-71744, ADI-71753, or ADI-71755, wherein each individual vhCDR comprises no more than 1 substitution, and wherein the vhCDR3 comprises no substitutions, and
[0266] ii) a light chain variable domain comprising a sequence exhibiting at least 90% %, at least 95%, or at least 98% identity to the light chain variable domain from ADI-71663, ADI-71662, ADI-66692, ADI-71701, ADI-71709, ADI-71710, ADI-71707, ADI-71717, ADI-71719, ADI-71220, ADI-71722, ADI-71736, ADI-71739, ADI-71728, ADI-66716, ADI-71741, ADI-71742, ADI-71744, ADI-71753, or ADI-71755, wherein each individual vlCDR comprises no more than 1 substitution, and wherein the vlCDR3 comprises no substitutions.

[0267] In some embodiments, the anti-IL18-BP antibody comprises:
[0268] i) a heavy chain variable domain comprising the vhCDR1, vhCDR2, and vhCDR3 from ADI-71663, ADI-71662, ADI-66692, ADI-71701, ADI-71709, ADI-71710, ADI-71707, ADI-71717, ADI-71719, ADI-71220, ADI-71722, ADI-71736, ADI-71739, ADI-71728, ADI-66716, ADI-71741, ADI-71742, ADI-71744, ADI-71753, or ADI-71755, and wherein said heavy chain variable domain comprises a sequence exhibiting at least 90% identity to the heavy chain variable domain from, ADI-71663, ADI-71662, ADI-66692, ADI-71701, ADI-71709, ADI-71710, ADI-71707, ADI-71717, ADI-71719, ADI-71220, ADI-71722, ADI-71736, ADI-71739, ADI-71728, ADI-66716, ADI-71741, ADI-71742, ADI-71744, ADI-71753, or ADI-71755, wherein each individual vhCDR comprises no more than 1 substitution, and wherein the vhCDR3 comprises no substitutions, and
[0269] ii) a light chain variable domain comprising the vlCDR1, vlCDR2, and vlCDR3 from ADI-71663, ADI-71662, ADI-66692, ADI-71701, ADI-71709, ADI-71710, ADI-71707, ADI-71717, ADI-71719, ADI-71220, ADI-71722, ADI-71736, ADI-71739, ADI-71728, ADI-66716, ADI-71741, ADI-71742, ADI-71744, ADI-71753, or ADI-71755, and wherein said light chain variable domain comprises a sequence exhibiting at least 90% identity to the light chain variable domain from ADI-71663, ADI-71662, ADI-66692, ADI-71701, ADI-71709, ADI-71710, ADI-71707, ADI-71717, ADI-71719, ADI-71220, ADI-71722, ADI-71736, ADI-71739, ADI-71728, ADI-66716, ADI-71741, ADI-71742, ADI-71744, ADI-71753, or ADI-71755, wherein each individual vlCDR comprises no more than 1 substitution, and wherein the vlCDR3 comprises no substitutions.

[0270] In some embodiments, the anti-IL18-BP antibody comprises:
[0271] i) a heavy chain variable domain comprising a sequence exhibiting at least 90%, at least 95%, or at least 98% identity to the heavy chain variable domain from ADI-71663, ADI-71662, ADI-66692, ADI-71701, ADI-71709, ADI-71710, ADI-71707, ADI-71717, ADI-71719, ADI-71220, ADI-71722, ADI-71736, ADI-71739, ADI-71728, ADI-66716, ADI-71741, ADI-71742, ADI-71744, ADI-71753, or ADI-71755, wherein each individual vhCDR comprises no more than 1 substitution, and wherein the vhCDR3 comprises no substitutions, and
[0272] ii) a light chain variable domain comprising a sequence exhibiting at least 90% %, at least 95%, or at least 98% identity to the light chain variable domain from ADI-71663, ADI-71662, ADI-66692, ADI-71701, ADI-71709, ADI-71710, ADI-71707, ADI-71717, ADI-71719, ADI-71220, ADI-71722, ADI-71736, ADI-71739, ADI-71728, ADI-66716, ADI-71741, ADI-71742, ADI-71744, ADI-71753, or ADI-71755, wherein each individual vlCDR comprises no more than 1 substitution, and wherein the vlCDR3 comprises no substitutions.

[0273] In some embodiments, the anti-IL18-BP antibody comprises:
[0274] i) a heavy chain variable domain comprising the vhCDR1, vhCDR2, and vhCDR3 from ADI-71663, ADI-71662, ADI-66692, ADI-71701, ADI-71709, ADI-71710, ADI-71707, ADI-71717, ADI-71719, ADI-71220, ADI-71722, ADI-71736, ADI-71739, ADI-71728, ADI-66716, ADI-71741, ADI-71742, ADI-71744, ADI-71753, or ADI-71755, and wherein said heavy chain variable domain comprises a sequence exhibiting at least 90% identity to the heavy chain variable domain from, ADI-71663, ADI-71662, ADI-66692, ADI-71701, ADI-71709, ADI-71710, ADI-71707, ADI-71717, ADI-71719, ADI-71220, ADI-71722, ADI-71736, ADI-71739, ADI-71728, ADI-66716, ADI-71741, ADI-71742, ADI-71744, ADI-71753, or ADI-71755, wherein each individual vhCDR comprises no more than 1 substitution, and wherein the vhCDR3 comprises no substitutions, and
[0275] ii) a light chain variable domain comprising the vlCDR1, vlCDR2, and vlCDR3 from ADI-71663, ADI-71662, ADI-66692, ADI-71701, ADI-71709, ADI-71710, ADI-71707, ADI-71717, ADI-71719, ADI-71220, ADI-71722, ADI-71736, ADI-71739, ADI-71728, ADI-66716, ADI-71741, ADI-71742, ADI-71744, ADI-71753, or ADI-71755, and wherein said light chain variable domain comprises a sequence exhibiting at least 90% identity to the light chain variable domain from ADI-71663, ADI-71662, ADI-66692, ADI-71701, ADI-71709, ADI-71710, ADI-71707, ADI-71717, ADI-71719, ADI-71220, ADI-71722, ADI-71736, ADI-71739, ADI-71728, ADI-66716, ADI-71741, ADI-71742, ADI-71744, ADI-71753, or ADI-71755, wherein each individual vlCDR comprises no more than 1 substitution, and wherein the vlCDR3 comprises no substitutions.

[0276] In some embodiments, the anti-IL18-BP antibody comprises the heavy chain variable domain from ADI-71663, ADI-71662, ADI-66692, ADI-71701, ADI-71709, ADI-71710, ADI-71707, ADI-71717, ADI-71719, ADI-71220, ADI-71722, ADI-71736, ADI-71739, ADI-71728, ADI-66716, ADI-71741, ADI-71742, ADI-71744, ADI-71753, or ADI-71755, and the light chain variable domain from, ADI-71663, ADI-71662, ADI-66692, ADI-71701, ADI-71709, ADI-71710, ADI-71707, ADI-71717, ADI-71719, ADI-71220, ADI-71722, ADI-71736, ADI-71739, ADI-71728, ADI-66716, ADI-71741, ADI-71742, ADI-71744, ADI-71753, or ADI-71755.

[0277] In some embodiments, the anti-IL18-BP antibody comprises the CH1-hinge-CH2-CH3 region from human IgG4.

[0278] In some embodiments, said hinge region comprises mutations.

[0279] In some embodiments, the anti-IL18-BP antibody comprises a CL region of human kappa 2 light chain.

[0280] In some embodiments, the anti-IL18-BP antibody comprises a CL region of human lambda 2 light chain.

[0281] In some embodiments, the anti-IL18-BP antibody comprises:
[0282] a) a heavy chain variable domain comprising a vhCDR1, a vhCDR2, and a vhCDR3 from an antibody selected from the group consisting of VH1-03.66650, VH1-69.66670, VH3-23.66692, VH1-39.66716, ADI-71663, ADI-71662, ADI-66692, ADI-71701, ADI-71709, ADI-71710, ADI-71707, ADI-71717, ADI-71719, ADI-71220, ADI-71722, ADI-71736, ADI-71739, ADI-71728, ADI-66716, ADI-71741, ADI-71742, ADI-71744, ADI-71753, or ADI-71755, and
[0283] b) a light chain variable domain comprising a vlCDR1, a vlCDR2, and a vlCDR3 from an antibody selected from the group consisting of VL-kappa-1-5, VL-kappa-1-12, ADI-71663, ADI-71662, ADI-66692, ADI-71701, ADI-71709, ADI-71710, ADI-71707, ADI-71717, ADI-71719, ADI-71220, ADI-71722, ADI-71736, ADI-71739, ADI-71728, ADI-66716, ADI-71741, ADI-71742, ADI-71744, ADI-71753, or ADI-71755.

[0284] In some embodiments, the anti-IL18-BP antibody comprises:
[0285] a) a heavy chain variable domain comprising a vhCDR1, a vhCDR2, and a vhCDR3 from an antibody selected from the group consisting of VH1-03.66650, VH1-69.66670, VH3-23.66692, VH1-39.66716, ADI-71663, ADI-71662, ADI-66692, ADI-71701, ADI-71709, ADI-71710, ADI-71707, ADI-71717, ADI-71719, ADI-71220, ADI-71722, ADI-71736, ADI-71739, ADI-71728, ADI-66716, ADI-71741, ADI-71742, ADI-71744, ADI-71753, or ADI-71755, and
[0286] b) a light chain variable domain comprising a vlCDR1, a vlCDR2, and a vlCDR3 from an antibody selected from the group consisting of VL-kappa-1-5, VL-kappa-1-12, ADI-71663, ADI-71662, ADI-66692, ADI-71701, ADI-71709, ADI-71710, ADI-71707, ADI-71717, ADI-71719, ADI-71220, ADI-71722, ADI-71736, ADI-71739, ADI-71728, ADI-66716, ADI-71741, ADI-71742, ADI-71744, ADI-71753, or ADI-71755; and
[0287] optionally, 1) wherein each CDR individually comprises from 0 to 4 substitutions and wherein no individual CDR comprises more than 1 substitution, and wherein the vhCDR3 and vlCDR3 comprise no substitutions, 2) wherein each CDR individually comprises 1 substitution, or 3) wherein each individual vhCDR comprises no more than 1 substitution, and wherein the vhCDR3 comprises no substitutions.

[0288] In some embodiments, the anti-IL18-BP antibody comprises a CH1-hinge-CH2-CH3 region from human IgG1, IgG2, IgG3, or IgG4, wherein said hinge region optionally comprises mutations.

[0289] In some embodiments, the anti-IL18-BP antibody comprises the CH1-hinge-CH2-CH3 region from human IgG4.

[0290] In some embodiments, said hinge region comprises mutations.

[0291] In some embodiments, the anti-IL18-BP antibody comprises a CL region of human kappa 2 light chain.

[0292] In some embodiments, the anti-IL18-BP antibody comprises a CL region of human lambda 2 light chain.

[0293] In some embodiments, the anti-IL18-BP antibody competes for binding with an antibody recited in any one of the preceding embodiments.

[0294] In some embodiments, the anti-IL18-BP antibody comprises an antibody for use in treatment of cancer by activating T cells, NK cells, NKT cells, Dendritic cells, MAIT T cells, T6 T cells, and/or innate lymphoid cells (ILCs), and/or modulating Myeloid cells in a patient.

[0295] In some embodiments, the anti-IL18BP antibody increases IL-18 mediated immuno-stimulating activity in the tumor microenvironment (TME), and/or lymph nodes.

[0296] Also provided herein is use of an anti-IL18-BP antibody for treating cancer in a recipient patient.

[0297] In some embodiments, the anti-IL18BP antibody is for use according to any of the preceding embodiments.

[0298] In some embodiments, anti-IL18BP antibody is for use in combination with a second antibody.

[0299] In some embodiments the second antibody is selected from the group consisting of an anti-PVRIG antibody, an anti-PD-1 antibody, an anti-PD-L1 antibody, and an anti-TIGIT antibody.

[0300] In some embodiments, the anti-IL18-BP antibody exhibits a binding affinity or K_{D} of less than 0.005 pM, 0.01 pM, 0.02 pM, 0.03 pM, 0.04 pM, 0.05 pM, 0.06 pM, 0.07 pM, 0.08 pM, 0.09 pM, 0.10 pM, 0.15 pM, 0.20 pM, 0.25 pM, 0.30 pM, 0.35 pM, 0.40 pM, 0.45 pM, 0.50 pM, 0.55 pM, 0.60 pM, 0.65 pM, 0.70 pM, 0.75 pM, 0.80 pM, 0.85 pM, 0.90 pM, 0.95 pM, or 1 pM.

[0301] In some embodiments, the anti-IL18-BP antibody binds a conformational epitope comprising a first amino acid sequence comprising one or more amino acid residues of SEQ ID NO: 1917, and/or a second amino acid sequence comprising one or more amino acid residues of SEQ ID NO: 1919.

[0302] In some embodiments, the anti-IL18-BP antibody binds one or more of residues S1, R2, F3, P4, N5, F6, S7, I8, and L9 of SEQ ID NO: 1917.

[0303] In some embodiments, the anti-IL18-BP antibody binds one or more of residues S7, I8, and L9 of SEQ ID NO: 1917.

[0304] In some embodiments, the anti-IL18-BP antibody binds residues S7, I8, and L9 of SEQ ID NO: 1917.

[0305] In some embodiments, the anti-IL18-BP antibody binds one or more of residues V1, D2, P3, E4, Q5, V6, V7, Q8, and R9 of SEQ ID NO: 1919.

[0306] In some embodiments, the anti-IL18-BP antibody binds one or more of residues D2, P3, E4, Q5, V6, V7, Q8, and R9 of SEQ ID NO: 1919.

[0307] In some embodiments, the anti-IL18-BP antibody binds residues D2, P3, E4, Q5, V6, V7, Q8, and R9 of SEQ ID NO: 1919.

[0308] In some embodiments, the anti-IL18-BP antibody binds IL18-BP isoform a or IL18-BP isoform c.

[0309] In some embodiments, the anti-IL18-BP antibody binds IL18-BP isoform a.

[0310] In some embodiments, the anti-IL18-BP antibody binds IL18-BP isoform c.

[0311] In some embodiments, the anti-IL18-BP antibody does not bind IL18-BP isoform b or IL18-BP isoform d.

[0312] In some embodiments, the anti-IL18-BP antibody does not bind IL18-BP isoform b.

[0313] In some embodiments, the anti-IL18-BP antibody does not bind IL18-BP isoform d.

### BRIEF DESCRIPTION OF THE DRAWINGS

[0314] FIGS. 1A-1L depict the vhCDR1, vhCDR2, vhCDR3, vlCDR1, vlCDR2, vlCDR3 sequence of antibody 66650 (FIGS. 1A and 1E and 1I), 66670 (FIGS. 1B and 1F and 1J), 66692 (FIGS. 1C and 1G and 1K), 66716 (FIGS. 1D and 1H and 1L). FIG. 1M provides IgG sequences, including IgG1, IgG2, IgG3 and IgG4.

[0315] FIGS. 2A-2U depict the variable heavy and light chains, the vhCDR1, vhCDR2, vhCDR3, vlCDR1, vlCDR2, vlCDR3 sequences as well as the full length of the antibodies ADI-71709 (FIG. 2A), ADI-71719 (FIG. 2B), ADI-71720 (FIG. 2C), ADI-71722 (FIG. 2D), ADI-71701 (FIG. 2E), ADI-71663 (FIG. 2F), ADI-71662 (FIG. 2G), ADI-66692 (FIG. 2H), ADI-71710 (FIG. 2I), ADI-71717 (FIG. 2J), ADI-71739 (FIG. 2K), ADI-71736 (FIG. 2L), ADI-71707 (FIG. 2M), ADI-66716 (FIG. 2N), ADI-71728 (FIG. 2O), ADI-71741 (FIG. 2P), ADI-71742 (FIG. 2Q), ADI-71744 (FIG. 2R), ADI-71753 (FIG. 2S), ADI-71755 (FIG. 2T), and AB-837 (referred also as “AbD35328”, “837”, or “Ab837”) (FIG. 2U).

[0316] FIGS. 3A-3E: FIG. 3A depicts the alignment of CDRH and CDRL sequence between VH3-23 and VL-kappa-1-12 germline sequences-71663 and 71662 and 66692. FIG. 3B depicts the alignment of CDRH and CDRL sequence between VH1-03 and VL-kappa-1-5 germline sequences 71701, 71707, 71709, 71710, and 71717. FIG. 3C depicts the alignment of CDRH and CDRL sequence between VH1-69 and VL-kappa-1-2 germline sequences 71719, 71720, 71722 and 71728. FIG. 3D depicts the alignment of CDRH and CDRL sequence between VH4-39 and VL-kappa-1-12 germline sequences-71736, 71739 and 66716. FIG. 3E depicts the alignment of CDRH and CDRL sequence between VH4-39 and VL-kappa-1-12 germline sequences-71736, 71739, 66716, 71742, 71744, 71741, 71753 and 71755.

[0317] FIGS. 4A-4B: FIG. 4A depicts the expression of IL18 across all TCGA tumors, and FIG. 4B depicts the expression of IL18-BP across all TCGA tumors. Box plot of log 10 RPKM for each TCGA tumors, reference line at 1 RPKM.

[0318] FIGS. 5A-5B: FIG. 5A depicts IL18 stratified by IFNγ expression per tumor type in TCGA; FIG. 5B depicts IL18-BP stratified by IFNγ expression per tumor type in TCGA. Box plot of log 10 RPKM for each TCGA tumors, reference line at 1 RPKM. For tumor abbreviations see Table 1. IFNγ high represent the top quartile and IFNγ low represents the bottom quartile. FC—fold change, P—p-value of student's T-test between IFNγ high to IFNγ low. Fraction represents the number of samples in IFNγ high/IFNγ low.

[0319] FIGS. 6A-6B: FIG. 6A depicts core inflammasome signature, stratified by IFNγexpression per tumor type in TCGA. Box plot of log 10 RPKM for each TCGA tumors, reference line at 1 RPKM. For tumor abbreviations see Table 1. IFNγ high represent the top quartile and IFNγ low represents the bottom quartile. FC—fold change, P—p-value of student's T-test between IFNγ high to IFNγ low. Fraction represents the number of samples in IFNγ high/IFNγlow. FIG. 6B depicts cosine similarity heatmap and dandogram, between core inflammasome genes, IL18, IL18-BP, IL18R's, and additional upstream inflammasome genes.

[0320] FIGS. 7A-7B: FIG. 7A depicts DotPlot of IL18 and IL18-BP, in subtype of breast cancer, pre and on treatment, expression of the two genes pre and on treatment in TNBC. FIG. 7B depicts DotPlot of IL18 and IL18-BP, expression of the two genes pre and on treatment in TNBC, divided also by expanding TCR clones (_E) and non-expanding TCR clones (_NE).

[0321] FIG. 8 depicts affinity matrix for mAbs against human IL18-BP to human and cynomolgus monkey (“cyno”) IL18-BP by Biacore.

[0322] FIG. 9: Competition with human IL18 for the binding of IL18-BP-Fc performed in AlfaLISA assay with 15 nM of purified Ab with hIgG1 backbone.

[0323] FIG. 10: The blocking activity of the parental mAbs against human IL18-BP analyzed by ELISA

[0324] FIG. 11: The blocking activity of the parental mAbs against cynomolgus monkey IL18-BP analyzed by ELISA.

[0325] FIG. 12: IC50 values for the anti-human IL18-BP Abs measured by ELISA.

[0326] FIG. 13: The ability of the mAbs against human IL18-BP to rescue human IL18 bound by IL18-BP-Fc protein demonstrated using IL18 HEK293 reporter cells.

[0327] FIGS. 14A-14H: Anti-IL-18BP antibodies fully restored IL-18 activity on NK cells. FIGS. 14A and 14H show schematic representations of assay setup; thawed NK cells from four donors were cultured for 30 minutes with rhIL-18 (3 or 10 ng/ml) and rhIL-18BP (1 μg/ml), in the presence of rhIL-12 (10 ng/ml) to allow the formation of IL-18-IL-18BP complex. 30 minutes post incubation, the cells were treated with a dose titration of anti-IL-18BP antibodies (20 μg/ml to 0.25 μg/ml; dilution factor of 1:3 (FIGS. 14A-14G); or 10 μg/ml to 0.325 μg/ml; dilution factor of 1:2 (FIGS. 14H-14N)) or isotype control (20 μg/ml (FIGS. 14A-14G) or 10 μg/ml (FIGS. 14A-14G)). FIGS. 14I-14N show Anti-IL-18BP antibodies were able to fully restore IFNγsecretion (FIGS. 14B-14D and 14I-14N) and CD69 expression (FIGS. 14E-G) in a dose-dependent manner. Isotype controls were not able to restore IL-18 activity. FIG. 14N shows the dose response curve of % rescue by Anti-IL-18BP antibodies and calculated EC50s. Representative data is from one donor. Rescue by anti-IL-18BP Ab is calculated as: [(IL-12+IL-18+IL-18BP+ anti-IL-18BP Ab)-(IL-12+IL-18+IL-18BP+ Isotype)]/[(IL-12+IL-18)-(IL-12+IL-18+IL-18BP+ Isotype)].

[0328] FIGS. 15A-15J: Anti-IL-18BP antibodies blocked IL-18BP secreted from PBMCs. FIGS. 15A, 15D show Schematic representation of assay setup; thawed PBMCs from two donors were cultured for 24 hours with rhIL-12 (10 ng/ml), rhIL-18 (33.3 ng/ml) and a dose titration of anti-IL-18BP antibodies (FIG. 15B: 20 μg/ml to 0.625 μg/ml; dilution factor of 1:2. FIGS. 15E-15J: 6 ug/ml to 0.002 μg/ml; dilution factor of 1:3) or isotype control (20 μg/ml). FIGS. 15B-15C and 15E-15J show Anti-IL-18BP antibodies were able to induce dose-dependent IFNγ secretion above the IL-12+IL-18 control levels, suggesting that the antibodies can block endogenous IL-18BP activity. Representative data is from one donor.

[0329] FIG. 16 depicts affinity measurement of anti-mouse mIL18BP Ab to mouse IL18-BP protein by ELISA.

[0330] FIG. 17 depicts SPR kinetic measurement of anti-mouse IL18-BP (AbD35328 (referred also as “837”, “Ab837” or “AB-837”)).

[0331] FIG. 18 depicts analysis of mAbs performance in functional blocking of mIL18-BP-mIL-18 interaction by ELISA.

[0332] FIG. 19 depicts IC50 analysis for anti-mouse IL18-BP (AbD35328).

[0333] FIG. 20 depicts the functional blocking activity of purified mAbs against mouse IL18-BP by IFNg secretion.

[0334] FIG. 21 depicts the EC50 analysis for anti-mouse IL18-BP.

[0335] FIGS. 22A-22L depict assessment of anti-IL18-BP monotherapy or combo therapy with anti-PD-L1 Ab in mouse syngeneic CT26 tumor model. FIG. 22A: tumor growth measurement of each group in monotherapy, FIG. 22B: survival percentage analysis of each group in monotherapy, FIGS. 22C-22F: overview of tumor growth measurement of individual mice in each group of monotherapy; FIG. 22G: tumor growth measurement of each group in combo therapy, FIG. 22H: survival percentage analysis of combo therapy, FIGS. 22I-22K: overview of tumor growth measurement of individual mice in each group of combo therapy, and FIG. 22L:statistical analysis of the effects of combo therapy.

[0336] FIGS. 23A-23L depict assessment of anti-IL18-BP monotherapy or combo therapy with anti-PD-L1 Ab in mouse syngeneic B16/Db-hmgp100 mouse tumor model. FIG. 23A: tumor growth measurement of each group in monotherapy, FIG. 23B:survival percentage analysis of each group in monotherapy, FIGS. 23C-23F: overview of tumor growth measurement of individual mice in each group of mono therapy, FIG. 23G:tumor growth measurement of each group in combo therapy, FIG. 23H: survival percentage analysis of each group in combo therapy FIG. 23I-23K: overview of tumor growth measurement of individual mice in each group of combo therapy, and FIG. 23L: statistical analysis of the effects of combo therapy.

[0337] FIGS. 24A-24G depict activity of Anti-IL18-BP and anti-TIGIT Combination in B16/Db-hmgp100 Syngeneic Mouse Tumor Model. FIG. 24A: tumor growth measurement of each group in combo therapy, FIG. 24B: survival percentage analysis of each group combo therapy, FIGS. 24C-24F: overview of tumor growth measurement of individual mice in each group of combo therapy, and FIG. 24G: statistical analysis of the effects of combo therapy.

[0338] FIGS. 25A-25G depict activity of Anti-IL18-BP and anti-PVRIG Combination in B16/Db-hmgp100 Syngeneic Mouse Tumor Model. FIG. 25A: tumor growth measurement of each group in combo therapy, FIG. 25B: survival percentage analysis of each group in combo therapy; FIGS. 25C-25F: overview of tumor growth measurement of individual mice in each group of combo therapy, and FIG. 25G: statistical analysis of the effects of combo therapy.

[0339] FIGS. 26A-26G depict monotherapy activity of anti-18-BP and anti-mPD-L1 in syngeneic E0771 orthotopic mouse tumor model. FIG. 26A: tumor growth measurement of each group in monotherapy, FIGS. 26B-26E: overview of tumor growth measurement of individual mice in each group of monotherapy, FIG. 26F: survival percentage analysis of each group in monotherapy, and FIG. 26G: statistical analysis of the effects of monotherapy.

[0340] FIGS. 27A-27F depict tumor rechallenge experiment of E0771 TNBC model. Groups of 5-10 C57BL/6 tumor-naïve age-matched mice were orthotopically inoculated with E0771 (0.5×10⁶ cells). When tumor reached the volume of 250 mm³, mice were treated with designated mAb: AB-837 mIgG1-D265A or isotype control followed by 5 additional doses. After two months, tumor-free and naïve aged-matched mice were orthotopically re-inoculated with E0771. FIG. 27A: Tumor volumes are represented as the mean volume±SEM. FIG. 27B Individual tumors measurements for each mouse are depicted, CR-complete responders, PR-partially responders (TV<=500 mm³). FIG. 27C Kaplan-Meier survival curves for each group are shown.

[0341] FIG. 27D Spleen weight/body weight ratio. FIG. 27E percent of CD44⁺CD62L-CD8⁺ effector T cells. FIG. 27F number of CD19+ cells per mg spleen.

[0342] FIGS. 28A-28F depict the amino acid sequence of the human (FIG. 28A) and mouse (FIG. 28C) IL18-BP proteins. Signal Peptide sequence is highlighted. The secreted human and mouse IL18-BP protein chains are depicted in FIGS. 28B and 28D, respectively. FIGS. 28E and 28F depict the amino acid sequence of human and mouse IL18 proteins, respectively.

[0343] FIGS. 29A-29B depict the variable heavy and light chains as well as the vhCDR1, vhCDR2, vhCDR3, vlCDR1, vlCDR2 and vlCDR3 sequences of CHA.7.518.1.H4(S241P) and CHA.7.538.1.2.H4(S241P).

[0344] FIGS. 30A-30B depicts the variable heavy and light chains as well as the vhCDR1, vhCDR2, vhCDR3, vlCDR1, vlCDR2 and vlCDR3 sequences of CPA.9.083.H4(S241P) and CPA.9.086.H4(S241P).

[0345] FIG. 31 shows the ability of the mAbs against human IL18-BP to rescue human IL18 bound by IL18-BP in human serum demonstrated by ELISA

[0346] FIG. 32 shows the ability of the mAbs against human IL18-BP to rescue cyno IL18 bound by cyno IL18-BP demonstrated using ELISA.

[0347] FIG. 33 shows TIGIT and IL18Ra are co-expression within the TME.

[0348] FIGS. 34A-34QQQQ depict the sequences of four anti-TIGIT antibodies that block the interaction of TIGIT and PVR, CPA.9.083.H4(S241P), CPA.9.086.H4(S241P), CHA.9.547.7.H4(S241P) and CHA.9.547.13.H4(S241P), as well as benchmark antibodies, BM26 and BM29, and numerous other anti-TIGIT antibodies. In FIG. 34EEE, MAB1-IgG4, MAB2-IgG4, MAB3-IgG4, MAB4-IgG4, and MAB5-IgG4 have the same CDRH3 (SEQ ID NO: 1926), CDRL1 (SEQ ID NO: 1928), CDRL2 (SEQ ID NO: 1929), CDRL3 (SEQ ID NO: 1930), and VL (SEQ ID NO: 1931). MAB1-IgG4 has CDRH1 and CDRH2 having the sequences of SEQ ID NOS: 1924 and 1925, respectively, and VH having the sequences of SEQ ID NO: 1927; MAB2-IgG4 has CDRH1 and CDRH2 having the sequences of SEQ ID NOS: 1932 and 1933, respectively, and VH having the sequence of SEQ ID NO: 1934; MAB3-IgG4 has CDRH1 and CDRH2 having the sequences of SEQ ID NOS: 1935 and 1933, respectively, and VH having the sequence of SEQ ID NO: 1936; MAB4-IgG4 has CDRH1 and CDRH2 having the sequences of SEQ ID NOS: 1935 and 1933, respectively, and VH having the sequence of SEQ ID NO: 1937; MAB5-IgG4 has CDRH1 and CDRH2 having the sequences of SEQ ID NOS: 1935 and 1938, respectively, and VH having the sequence of SEQ ID NO: 1939. In FIG. 34FFF, MAB6-IgG4, MAB7-IgG4, MAB8-IgG4, MAB9-IgG4, and MAB10-IgG4 have the same CDRL1 (SEQ ID NO: 1943), CDRL2 (SEQ ID NO: 1944), CDRL3 (SEQ ID NO: 1945), and VL (SEQ ID NO: 1947). MAB6-IgG4, MAB7-IgG4, MAB8-IgG4, and MAB9-IgG4 has the same CDRH3 (SEQ ID NO: 1942). MAB6-IgG4 has CDRH1 and CDRH2 having the sequences of SEQ ID NOS: 1943 and 1044, respectively, and VH having the sequence of SEQ ID NO: 1946; MAB7-IgG4 has CDRH1 and CDRH2 having the sequences of SEQ ID NOS: 1948 and 1949, respectively, and VH having the sequence of SEQ ID NO: 1950; MAB8-IgG4 has CDRH1 and CDRH2 having the sequences of SEQ ID NOS: 1941 and 1952, respectively, and VH having the sequence of SEQ ID NO: 1953; MAB9-IgG4 has CDRH1 and CDRH2 having the sequences of SEQ ID NOS: 1954 and 1949, respectively, and VH having the sequence of SEQ ID NO: 1955; MAB10-IgG4 has CDRH1-3 having the sequences of SEQ ID NOS: 1954, 1949 and 1956, respectively, and VH having the sequence of SEQ ID NO: 1957. In FIG. 34GGG, MAB11-IgG4 and MAB12-IgG4 both have CDRH1-3 having the sequences of SEQ ID NOS: 1954, 1949, and 1956, respectively, CDRL1-3 having the sequences of SEQ ID NOS: 1943-1945, respectively, and VL having the sequence of SEQ ID NO: 1947; MAB11-IgG4 has a VH having the sequence of SEQ ID NO: 1958; MAB12-IgG4 has a VH having the sequence of SEQ ID NO: 1959; MAB13-IgG4, MAB14-IgG4 and MAB15-IgG4 share CDRL1-3 having the sequences of SEQ ID NOS: 1960-1962, and CDRH3 having the sequence of SEQ ID NO: 1964, respectively; MAB13-IgG4 has CDRH1 and CDRH2 having the sequences of SEQ ID NO: 1965 and 1963, respectively, and a VH and VL having the sequences of SEQ ID NOS: 1966 and 1967, respectively; MAB14-IgG4 has CDRH1 and CDRH2 having the sequences of SEQ ID NOS: 1968 and 1963, and a VH and VL having the sequences of SEQ ID NOS: 1969 and 1970, respectively; MAB15-IgG4 has CDRH1 and CDRH2 having the sequences of SEQ ID NOs: 1971 and 1974, respectively, and a VH and VL having the sequences of SEQ ID NOS: 1972 and 1970, respectively. In FIG. 34HHH, MAB16-IgG4 through MAB17-IgG4, MAB18-IgG4, MAB19-IgG4, MAB20-IgG4, and MAB21-IgG4 share CDRL1 and CDRL2 having the sequences of SEQ ID NOS: 1960 and 1961, respectively; MAB16-IgG4, MAB17-IgG4, and MAB18-IgG4 share a CDRL3 having the sequence of SEQ ID NO: 1962, and VL having the sequence of SEQ ID NO: 1970; MAB19-IgG4, MAB20-IgG4, and MAB21-IgG4 share a CDRL3 having the sequence of SEQ ID NO: 1973, and a VL having the sequence of SEQ ID NO: 1977; MAB16-IgG4 has CDRH1-3 having the sequences of SEQ ID NOS: 1971, 1974, and 1975, respectively, and a VH having the sequence of SEQ ID NO: 1976; MAB17-IgG4 has CDRH1-3 having the sequences of SEQ ID NOS: 1978, 1979, and 1975, respectively, and a VH having the sequence of SEQ ID NO: 1980; MAB18-IgG4 has CDRH1-3 having the sequences of SEQ ID NOS: 1968, 1979, and 1964, respectively, and a VH having the sequence of SEQ ID NO: 1981; MAB19-IgG4 has CDRH1-3 having the sequences of SEQ ID NOS: 1982-1984, respectively, and a VH having the sequence of SEQ ID NO: 1985; MAB20-IgG4 has CDRH1-3 having the sequences of SEQ ID NOS: 1982, 1986, and 1984, respectively, and a VH having the sequence of SEQ ID NO: 1987; MAB21-IgG4 has CDRH1-3 having the sequences of SEQ ID NOS: 1982, 1988, and 1984, respectively, and a VH having the sequence of SEQ ID NO: 1989.

[0349] FIGS. 35A-35B depict the amino acid sequences of the constant domains of human IgG1 (with some useful amino acid substitutions), IgG2, IgG3, IgG4, IgG4 with a hinge variant that finds particular use in the present invention, and the constant domains of the kappa and lambda light chains.

[0350] FIGS. 36A-36AG depict the variable heavy and light chains as well as the vhCDR1, vhCDR2, vhCDR3, vlCDR1, vlCDR2 and vlCDR3 sequences of the anti-PVRIG antibodies of the invention.

[0351] FIGS. 37A-37D depict the sequences of other PVRIG antibodies of the present invention.

[0352] FIGS. 38A-38X provide additional anti-PVRIG antibodies for use in the present invention.

[0353] FIGS. 39A-39B depict the sequences of exemplary anti-PD-1 antibodies.

[0354] FIGS. 40A-40I depict the sequences of exemplary anti-PD-L1 antibodies.

[0355] FIGS. 41A-41D depict Biacore KD measurements, performed with biotinylated human/cyno IL18BP-Fc protein coated on the CM5 chip. FIGS. 41A and 41B: Biacore image of the anti-IL18BP Fab-human IL18BP interactions; 10 min dissociation (FIG. 41A), 85 min dissociation (FIG. 41B). FIGS. 41C and 41D: Biacore image of the anti-IL18BP Fab-cyno IL18BP interactions, 10 min dissociation (FIG. 41C), 85 min dissociation (FIG. 41D).

[0356] FIG. 42 depicts a Table, showing K_{D} values for human/cyno anti-IL18BP Fab-IL18BP interactions measured by Biacore.

[0357] FIGS. 43A-43B present the affinity of optimized IL18BP antibodies, accessed using MSD. FIG. 43A shows an overlay of the Fab-IL18BP MSD Image (in Black) with the Human IL-18-IL18BP MSD Image (in Green). FIG. 43B shows an overlay of the Fab-IL18BP MSD Image (in Black) with the Cyno IL-18-IL18BP MSD Image (in Green).

[0358] FIG. 44 presents a Table, showing KD values for human/cyno anti-IL18BP Fab-IL18BP interactions measured by MSD.

[0359] FIG. 45 presents a Table, showing KD values for human/cyno IL18-IL18BP interactions measured by MSD.

[0360] FIG. 46 provides exemplary antibody characteristics for an αIL-18BP antibody (αIL-18BP Ab) of interest.

[0361] FIG. 47 shows IL-18BP levels are elevated in human cancers. Expression of IL18BP transcripts in normal (green) or cancer (red) tissues from the TCGA database. GBM, glioblastoma multiforme; HSNC, head and neck squamous carcinoma; KIRC, kidney renal clear cell carcinoma; PAAD, pancreatic adenocarcinoma; SKCM, skin cutaneous melanoma; STAD, stomach adenocarcinoma (*P<0.01).

[0362] FIG. 48 shows IL-18BP is expressed in suppressive myeloid populations in the TME suggesting resistance mechanism. Single-cell RNA analyses of tumor-infiltrating myeloid cells, including tumor associated macrophages (TAMs) and dendritic cells (DCs) in human Colorectal cancer (CRC) showing that IL-18BP is expressed in suppressive myeloid population in the tumor. This suggests a resistance mechanism to immune activation in the tumor microenvironment (TME). Left Panel: Myeloid cell population in the peripheral (PBMC), normal tumor (NAT) and in the tumor. Right Panel: IL18BP is mainly expressed in cDC2-CD1C and TAM-C1QC, suppressive myeloid populations suggestive that IL18BP could be a resistance mechanism to immune cell activation in the tumor.

[0363] FIGS. 49A-49D shows that αIL-18BP Ab (ADI-71739) enhances stimulatory activity of human T cells. FIG. 49A shows schematic representation of assay setup; thawed tumor infiltrating lymphocytes (TTLs), co-cultured with MEL624 cells in a 1:1 ratio, were treated for 30 minutes with rhIL-18 (R&D systems, 30 ng/ml) and rhIL-18BP (R&D systems, 1 μg/ml), to allow the formation of IL-18-IL-18BP complex. 30 minutes post incubation, the cells were treated with ADI-71739 or isotype control (10 μg/ml). FIG. 49B shows that the anti-IL-18BP antibody was able to increase IFNγ secretion from TILs compared to isotype control. FIG. 49C shows schematic representation of assay setup; MEL-624 cells that overexpress PD-L1 were loaded with CMV pp65 peptide and seeded. The cells were cultured for 30 minutes with rhIL-18 (30 ng/ml) and rhIL-18BP (2 μg/ml), to allow the formation of IL-18-IL-18BP complex. Then the cells were treated with ADI-71739, Pembrolizumab or isotype control (all antibodies were administered at same final concentration of 10 μg/ml). 30 minutes post incubation with antibodies, CMV-reactive T-cells were added to the culture. FIG. 49D: ADI-71739 as mono was able to increase IFNγ secretion from CMV-reactive T-cells, and in a more potent manner when combined with Pembrolizumab.

[0364] FIGS. 50A-50B shows anti-IL-18BP antibody fully restored IL-18 activity in MEL624:TIL assay. FIG. 50A shows schematic representation of assay setup; thawed tumor infiltrating lymphocytes (TTLs), co-cultured with MEL624 cells in a 1:1 ratio, were treated for 30 minutes with rhIL-18 (30 ng/ml) and rhIL-18BP (1 μg/ml), to allow the formation of IL-18-IL-18BP complex. 30 minutes post incubation, the cells were treated with a dose titration of anti-IL-18BP antibody (ADI-71722), (30 μg/ml to 0.01 μg/ml; dilution factor of 1:3) or isotype control (30 μg/ml). FIG. 50B shows that the anti-IL-18BP antibody was able to fully restore IFNγsecretion in a dose-dependent manner. The isotype control was not able to restore IL-18 activity. FIG. 50C shows the dose response curve of % rescue by anti-IL-18BP antibody and calculated EC50. Representative data is from one donor. Rescue by anti-IL-18BP Ab is calculated as: [(IL-18+IL-18BP+ anti-IL-18BP Ab)-(IL-18+IL-18BP+ Isotype)]/[(IL-18)-(IL-18+IL-18BP+ Isotype)].

[0365] FIGS. 51A-51B shows anti-hIL-18BP antibody enhances activity of PD-1 and DNAM-1 axis blockade in an in-vitro CMV recall assay. Anti-IL-18BP antibody increased IFNg secretion by CMV-reactive T-cells as mono and in combination with aPVRIG/aTIGIT/Pembrolizumab. FIG. 51A shows schematic representation of assay setup; MEL-624 cells that overexpress PD-L1 were loaded with CMV pp65 peptide and seeded. The cells were cultured for 30 minutes with rhIL-18 (30 ng/ml) and rhIL-18BP (2 μg/ml), to allow the formation of IL-18-IL-18BP complex. Then the cells were treated with anti-IL-18BP antibody (ADI-71722), anti-PVRIG, anti-TIGIT, Pembrolizumab or isotype control (all antibodies were administered at same final concentration of 10 μg/ml). 30 minutes post incubation with antibodies, CMV-reactive T-cells were added to the culture. FIG. 51B: ADI-71722 increased IFNγ secretion by CMV-reactive T-cells as mono and in combination with anti-PVRIG/anti-TIGIT/Pembrolizumab. Left figure: Anti-IL-18BP antibody as mono was able to fully restore IFNγ secretion, and in a more potent manner when combined with Pembrolizumab/anti-PVRIG. Right figure: ADI-71722 as mono was able to fully restore IFNγ secretion, and in a more potent manner when combined with Pembrolizumab/anti-TIGIT.

[0366] FIG. 52 provides data showing ADI-71739 binds human and cyno IL-18BP at high affinity and mouse Il-18 bp at low affinity. ADI-71739 binds human and cyno IL-18BP at high affinity and mouse Il-18 bp at low affinity: upper panel (from left to right): human IL18-IL18BP interaction, cyno IL18-IL18BP interaction and mouse IL18-IL18BP interaction measurements in KinExA, final KD are 441 fM, 345 fM and 3.7 pM respectively. Lower panel (from left to right): ADI-71739-human IL18BP interaction, ADI-71739—cyno IL18BP interaction measurement in KinExA and ADI-71739—mouse IL18BP interaction measurement by Biacore. Final KD are 291 fM, 209 fM and 4 nM respectively. For each run in KinExA, two or three curves with different column binding protein (CBP) concentrations were run and analyzed using n-curve analysis to determine the Kd.

[0367] FIG. 53 shows blocking effect of anti IL18BP Abs on the binding of human IL18BP to human IL-18. Blocking effect of anti-IL18BP Abs was tested by ELISA, using 1 ng/ml human IL-18 protein.

[0368] FIG. 54 shows competition ELISA using complex of soluble IL18-IL18BP and anti IL18BP Abs. Blocking of IL18-IL18BP complex formation was tested by ELISA, MAB1191 shows reduced blocking activity compared to 66716 Ab.

[0369] FIGS. 55A-55B show IL18Ra is expressed on TILs subsets in the TME and its expression is induced on TTLs compared to periphery. IL18Ra is expressed on TTLs in the TME and its expression is induced on CD4 TTLs compared with periphery. FIG. 55A shows the expression of IL18Ra on CD8+ and CD4+ and NK TTLs from dissociated human tumors of various cancer types is shown. Each dot represents a distinct tumor from an individual patient. Fold expression value was calculated by dividing the MFI of a target by the MFI of the relevant isotype control. (FOI). Average and SEM is shown by the ticks. FIG. 55B shows the expression of IL18Ra on CD4+ and CD8+ T and NK cells from donor-matched PBMCs and TME. Statistical analysis was preformed using paired t test (two tailed), P<0.05; **p=0.0064

[0370] FIGS. 56A-56B show IL18 levels in serum of cancer patients is increased compared with levels in HD serum. FIG. 56A shows levels of IL18 analytes (IL18 and IL18BP) in patient's serum across indications. FIG. 56B is Dot plot representing IL18 analytes in serum samples from an individual patient or HD. Statistical analysis was preformed using t test (two tailed), P<0.0005***

[0371] FIG. 57 shows IL18 analytes (IL18 and IL18BP) levels in tumor derived supernatants (TDS) across indications. Dot plot representing IL18 analytes in TDS samples. Each dot represents an individual patient's sample.

[0372] FIGS. 58A-58B show levels of IL18 (FIG. 58A) and IL18BP (FIG. 58B) in patient's tumor derived supernatant (TDS) across indications. Mean levels are represented by black lines.

[0373] FIGS. 59A-59C shows IL-18BP is expressed in suppressive myeloid populations in the TME suggesting resistance mechanism. IL-18BP is Expressed in Suppressive Myeloid Populations and correlate to PD-L1 in the TME Suggesting Resistance Mechanism. FIG. 59A: IL-18BP correlates with PD-L1 at RNA level (TCGA) in colon and breast cancers suggesting a resistance mechanism to immune activation in the tumor microenvironment (TME). FIG. 59B: single-cell RNA analyses of tumor-infiltrating myeloid cells, including tumor associated macrophages (TAMs) and dendritic cells (DCs) in colon cancer patients showing that IL-18BP is up-regulated in myeloid population in the TME compared to the periphery (PBMCs), suggesting a resistance mechanism to immune activation in the TME. FIG. 59C: single-cell RNA analyses of tumor-infiltrating myeloid cells, including tumor associated macrophages (TAMs) and dendritic cells (DCs) across indications showing that IL-18BP is up-regulated in myeloid population in the TME compared to the periphery (PBMCs), suggesting a resistance mechanism to immune activation in the TME.

[0374] FIGS. 60A-60D show IL-18BP is upregulated following immune checkpoint blockade (ICB) treatment. FIGS. 60A-60C: IL-18BP is upregulated (RNA level) following ICB treatment IL-18BP levels are upregulated in the tumor microenvironment (RNA) following treatment with anti-PD-1 (breast and basal cell carcinoma) or anti-PD-1 plus anti CTLA-4 (melanoma) suggesting a potential resistance mechanism. FIG. 60D: IL-18BP is elevated in NSCLC patient serum post aPD-(L)1 treatment Quantification of plasma IL-18BP protein level by ELISA for healthy donors (n=22) and patients with NSCLC (n=52) at baseline before treatment and after receiving treatment with anti-PD-(L)1 (n=52).

[0375] FIGS. 61A-61B show IL-18BP baseline serum levels may be associated with poor response to anti-PD-1. A supportive data for the role of IL-18BP as a soluble ICP and a potential resistance mechanism to PD1 blockage in Renal Cell Carcinoma patients receiving Pembrolizumab plus Lenvatinib. FIG. 61A: high IL-18BP in patient serum pre-treated with Pembrolizumab plus Lenvatinib is associated with shorter progression free survival (PFS). FIG. 61B: high IL-18BP in patient serum is pre-treated with Pembrolizumab plus Lenvatinib associated with stable or progressive disease (SD/PD).

[0376] FIG. 62 shows IL-18BP baseline serum levels may be associated with poor response to anti-PD-1. A supportive data for the role of IL-18BP as a soluble ICP and a potential resistance mechanism to PD1 blockage in melanoma cancer patients receiving anti PD-1 treatment. High IL-18BP in serum of melanoma cancer patients pre-treated with anti PD-1 is associated with poor response. Raw Olink data (NPX format) Student's T-test was performed for IL18BP protein after intensity normalization for Target products.

[0377] FIGS. 63A-63B shows Principal Component Analysis (PCA) of IL-18 and IL-18BP levels in serum of Head & Neck cancer. PCA shows that mainly tumor's sites separate between samples with high levels of IL-18 Vs. low levels. A-B. Location of tumor in tongue correlates with high levels of IL-18 and lower levels of IL18BP compared with other sites.

[0378] FIG. 64 shows IL-18 and IL-18BP levels (dotplots) in Head & Neck patient's serum in different tumor's sites. Higher levels of IL-18 in Head & Neck patient's serum are shown in tongue.

[0379] FIGS. 65A-65C shows IL18 and IL18BP plasma levels in NSCLC patients are increased following anti-PD-1 monotherapy or anti-PD-1+ chemotherapy combination. Average plasma levels of IL18 and IL18BP are higher in responder patients at baseline and increase in NR patients treated with anti-PD1. FIG. 65A: IL18 and IL18BP levels in plasma of R/NR NSCLC patients at baseline. FIG. 65B: IL18 and IL18BP levels in plasma of individual NSCLC patients (R/NR) at baseline and following single anti-PD-1 treatment. FIG. 65C: IL18 and IL18BP levels in plasma of individual NSCLC patients (R/NR) at baseline and following single anti PD1 treatment or following combined treatment of chemotherapy+ anti-PD-1. FIG. 65D: Percentage of change from baseline of IL18 and IL18BP in R/NR NSCLC patients following single anti-PD-1 treatment or chemotherapy combined with anti-PD-1. P values in A-C graphs were obtained following paired T test.

[0380] FIG. 66 shows the whole blood assay data. Anti-IL-18BP antibody Ab-71709, as mono or in combination with Nivolumab, did not show signs of systemic immune activation in ID.Flow, an ex vivo system that mimics the human blood circulation. Fresh whole blood was taken from six healthy volunteers and immediately transferred to a whole blood loop system. The test items were administered, and the blood was set to circulate at 37° C. to prevent clotting. Blood samples collected at the 24 hr time point were analyzed for hematology and flow cytometry parameters and then processed to plasma for cytokine analysis. The anti-CD52 antibody Alemtuzumab was included as a reference antibody with manageable cytokine release in the clinic. As opposed to Alemtuzumab, according to the various readouts employed, the anti-IL-18BP antibody did not induce any signs of systemic immune activation, as mono or in combination with the anti-PD1 antibody Nivolumab.

[0381] FIGS. 67A-67B show in vitro studies testing the effects of ADI-71739 on killing of melanoma cells by human TILs. Anti-IL18-BP antibody ADI-71739 increased killing of melanoma cells by tumor infiltrating lymphocytes. FIG. 67A: schematic representation of assay setup. MEL624 cells were co-cultured with human TILs that were previously enriched for MART1 or gp100 peptide-specific clones. rhIL-18 (R&D systems, 50 ng/ml) and rhIL-18BP (R&D systems, 1 μg/ml) were added to the co-culture for 30 minutes to allow the formation of IL-18:IL-18BP complex prior to treatment with 10 μg/ml ADI-71739 or isotype control. The co-culture was monitored for 72 hours using an IncuCyte live cell imaging instrument. FIG. 67B: addition of IL-18 (grey) enhanced tumor cell killing as indicated by lower confluence (left) and increased apoptosis (right) over time of the MEL624 cells. In the presence of the isotype control antibody (black), IL-18BP abrogated the effects of IL-18, while the anti-IL-18BP antibody (turquoise) was able to completely restore these effects.

[0382] FIGS. 68A-68B show in vitro studies testing the effects of combination of ADI-71739 with other checkpoint blocking antibodies. Anti-IL18-BP antibody ADI-71739 increased IFNg secretion by CMV-specific T cells as mono and in combination with aPVRIG/aTIGIT/Pembrolizumab. FIG. 68A: schematic representation of assay setup. MEL624 cells that overexpress PD-L1 were loaded with CMV peptide pp65. The cells were cultured for 30 minutes with rhIL-18 (R&D systems, 30 ng/ml) and rhIL-18BP (R&D systems, 2 μg/ml) to allow the formation of IL-18:IL-18BP complex, and the cells were then treated with 10 μg/ml ADI-71739 or aPVRIG (anti-PVRIG) or aTIGIT (anti-TIGIT) or Pembrolizumab (anti-PD-L1) or isotype control, as mono or in various combinations. CMV-specific T-cells were then added to the culture and IFNg secretion was measured after an overnight incubation. FIG. 68B: the anti-IL-18BP antibody alone was able to increase IFNγ secretion by the T cells, and this effect was augmented upon combination with Pembrolizumab/aPVRIG/aTIGIT.

[0383] FIGS. 69A-69B show in vitro studies testing the effects of ADI-71739 on human TIL function in the presence of endogenous IL-18BP levels. Anti-IL18BP antibody ADI-71739 increased IFNg release by tumor infiltrating lymphocytes. FIG. 69A: Schematic representation of assay setup. MEL624 cells were co-cultured with human TILs that were previously enriched for MART1 or gp100 peptide-specific clones. IL-18 (3.7 ng/ml) was added to the co-culture along with 5 μg/ml ADI-71739 or isotype control. The co-culture was set for 18 hours following which IFNg levels were measured in supernatants. FIG. 69B: IFNγ levels were increased in co-cultures treated with ADI-71739 (turquoise) as compared with isotype-treated samples (black). Representative examples from two TIL donors are shown.

[0384] FIGS. 70A-70C show that Bound IL-18 levels in the TME are above required amount for T cell activation in vitro. FIG. 70A: schematic representation of assay setup; thawed tumor infiltrating lymphocytes (TILs), co-cultured with MEL624 cells in a 1:1 ratio, were treated with rhIL-18 (R&D systems, 1.23-300 ng/ml) for 24 hr. FIG. 70B: rhIL-18 increased IFNγ secretion in a dose-dependent manner. rhIL-18 activates TILs in concentration above ˜1 ng/ml and reached saturation at ˜100 ng/ml. FIG. 70C: levels of bound IL-18 in TDS across indications are mostly above the level required for in vitro T cell activation. Bound IL18 levels were calculated by deducting IL18 free from total IL-18 measured for each sample by two separate ELISA kits. Dashed red line represent the level required for functional activity (1.5 ng/gr). Black lines represent the median level bound IL-18 for each tumor type.

[0385] FIGS. 71A-71B show that unlike other cytokines, inflammasome induced cytokines such as IL-18 and IL-1b are abundant in the TME. FIG. 71A: IL-18 and IL-1b are inflammasome derived cytokines with opposite effects in the TME. While IL-18 promotes T and NK cell activation and lead to anti tumorigenic activity, IL1b has a dual role and in sum of effects lead to pro-tumorigenic activity. FIG. 71B: dotplot shows levels of cytokines in tumor derived supernatants measured across various indications. Each dot represents one sample. The mean is depicted by the short black lines. Dashed red lines represent the limit of detection for each cytokine.

[0386] FIG. 72 shows anti-IL-18BP antibody and anti-PD-L1 antibody combination studies in mouse tumor models. Anti-IL-18BP Ab in combination with anti-PD-L1 Ab increase tumor growth inhibition and survival in mouse tumor model. Groups of ten 6 weeks old female C57BL/6 mice were subcutaneously injected with E0771 and were administered with mIgG1 Synagis isotype control, anti-mouse IL-18BP Ab, anti PDL1 ab or combination of anti-mouse IL-18BP Ab with anti PD-L1 ab (IP) followed by 6 additional doses. Tumor volumes are represented as the Mean volume+SEM. Tumor volumes were measured twice weekly.

[0387] FIGS. 73A-73I shows administration of anti-IL18BP Ab is expected to have a better therapeutic window and less peripheral effects than engineered IL-18. C57BL/6 mice were subcutaneously injected with MC38ova cells and treated with designated mAb Synagis mIgG1 (IP), anti-IL18 bp mIgG1 (IP), PBS (SC), or Engineered IL-18 (SC) twice weekly. FIG. 73A: mice were weighed once weekly. FIG. 73B: mice bled before the 4th treatment, 4 hours after the 4th treatment, and 24 hours after the 4th treatment. Serum was analyzed for the presence of indicated molecules—IFNg, TNF, MCP1, IL6. FIG. 73C: serum was analyzed for levels of IL-18. FIG. 73D: spleens were harvested from mice 24 hours after the 4th treatment and weighed. E) Spleens harvested from mice treated with recombinant IL15 or recombinant IL15+ILRa were weighed. FIGS. 73F-73I: immune composition and lymphocytes activation in spleens harvested from mice 24 hours after the 4th treatment with anti-IL18 bp antibody, isotype control, PBS, or engineered IL18.

[0388] FIGS. 74A-74B depict assessment of anti-IL18-BP monotherapy in mouse syngeneic MC38ova tumor model. C57BL/6 mice were subcutaneously injected with 1.2M MC38ova cells and treated with designated mAb Synagis mIgG1 (IP), anti-IL18 bp mIgG1 (IP) twice weekly. FIG. 74A: tumor growth measurement of each group, FIG. 74B: overview of tumor growth measurement of individual mice in each group.

[0389] FIGS. 75A-75H show that Anti-IL18 bp antibody modulates tumor microenvironment without effecting periphery in MC38ova tumor model. C57BL/6 mice were subcutaneously injected with MC38ova^{dim} and were treated with anti-mouse IL-18BP Ab (IP). Tumors, spleens and serum were harvested, and immune composition and cytokine concentrations were determined. FIGS. 75A-75G represent tumor microenvironment, FIG. 75H represents spleen, and FIG. 75I represents serum.

[0390] FIG. 76 shows binding of MAB1191 Ab to human IL18BP, affinity measurement using Biacore.

[0391] FIGS. 77A-77B show effect of combination of anti-IL18BP antibody with oxaliplatin in MC38ova^{dim} tumor model. Groups of 10 C57BL/6 mice were inoculated with MC380VA^{dim}. At tumor volume (TV) of 110 mm³, mice were treated with 5 mg/kg of oxaliplatin or control DDW. At TV 140 mm³ mice were treated with 15 mg/kg of anti-IL18BP mIgG1 Ab or isotype control, followed by 5 additional doses. FIG. 77A: TVs are represented as the mean volume±SEM. FIG. 77B: individual tumors measurements for each mouse are depicted (n=10 per group). CR-complete responders, PR-partially responders (TV<=500 mm³) CR-complete responders, PR-partially responders.

[0392] FIGS. 78A-78B show the anti-tumor activity of anti-mouse IL18BP as a single agent in MC380VA^{dim} and B16F10-hmgp100 mouse tumor models. Groups of 10 C57BL/6 mice were inoculated with MC38ova^{dim} or B16F10-hmgp100 cells. Mice were treated with designated mAb: anti IL-18BP Ab or isotype control. (A-B) anti-IL-18BP Ab inhibits tumor growth in MC38ova (FIG. 78A) or B16F10-hmgp100 (FIG. 78B) moues tumor models. Tumor volumes are represented as the mean volume±SEM.

[0393] FIGS. 79A-79H show the immune infiltrate composition of E0771 tumors is altered by monotherapy with anti-IL-18BP Ab: C57BL/6 mice were orthotopically inoculated with E0771 and were treated with anti-IL-18BP Ab or isotype control (IP). Tumors were harvested, and immune composition and cytokine concentrations were determined.

[0394] FIGS. 80A-80K show that IL-18BP blockade alters the immune infiltrate composition of E0771 tumors. FIG. 80A: heatmap showing markers for major cell subpopulations. FIG. 80B: enrichment of major immune population frequencies in anti-IL-18BP Ab treatment compared to the control group. Depicted is the log 2 fold change of the mean frequency. The size of the dots indicates the average fraction of the cell population between treatments, while the color of the dots represents the P values. FIG. 80C: as in FIG. 80B for T cell populations. FIG. 80D: heatmap showing markers for different T/NK subpopulations. FIG. 80E: enrichment of clonal expansion frequencies in anti-IL-18BP Ab treatment compared to the control group. TCR sequencing and quantification for clonotype expansion was performed on TCR+ T cells. FIGS. 80F-80G: as in FIG. 80A for tumor-associated monocytes and macrophages (FIG. 80F) and DC subtypes (FIG. 80G). FIG. 80H is a heatmap showing markers for different monocyte and macrophage subpopulations. FIG. 80I is a heatmap showing markers for different DC subpopulations. FIG. 80J shows GSEA on DEGs of tumor-associated monocytes and macrophages from control versus treatment group querying GO Biological Process 2021 gene sets. FIG. 80K shows GSEA on DEGs of tumor-associated DCs from control versus treatment group querying WikiPathway 2021 Human gene sets.

[0395] FIGS. 81A-81C show the effect of CD4, CD8 or NK cell depletion on single agent activity of anti-IL-18BP Ab in MC380VA^{dim} tumor model: Groups of 10 C57BL/6 mice were inoculated with MC38ova^{dim} tumor cells. Mice were treated with depletion mAb and with anti-IL-18BP Ab or isotype control followed by 5 additional doses. TV represented as the mean volume±SEM and Kaplan-Meier survival curves for CD8+ cells depleted mice (FIG. 81A), CD4+ cells depleted mice (FIG. 81B), and NK cells depleted mice (FIG. 81C).

[0396] FIGS. 82A and 82B show anti-IL18BP antibody Ab-71739 increased TNFα, IFNγ, IL2 and GZMB release by human tumor dissociated cells (TDCs). A. Resected cancer specimens that were dissociated to single-cell suspension were stained for immuno-phenotyping. B. Samples were cultured with anti-CD3/anti-CD28 mAbs for T-cell stimulation and treated with Ab-71739, anti-PD1 Ab pembrolizumab or with combination of Ab-71739+Pembro (all Abs were used at 10 mg/ml concentrations). After 3 days, cytokines and Granzyme secretion were measured in supernatants. Representative example from a human ovarian TDC sample is shown.

[0397] FIGS. 83A-83D show IL-18 is upregulated in the TME and IL-18BP-bound IL-18 is above the amount required for T cell activation in vitro. FIG. 83A shows IL-18 levels are significantly higher in the tumor compared to serum. Serum samples and tumor biopsies were collected from cancer patients. Tumor biopsies were dissociated, and supernatants were collected. IL-18 expression was analyzed in serum and tumor derived supernatants (TDS) using ELISA assay. FIG. 83B shows IL-18 expression in TDS samples from individual patients across different indications. FIG. 83C shows recombinant (r) IL-18 increased IFNg release by stimulated CD8+ tumor infiltrated lymphocytes (TILs) in TILs-tumor cells co-culture assay in a dose-dependent manner. MEL624 cells and TILs were seeded and treated with rIL-18 (0-100 ng/ml). Plates were incubated for 24 hours, after which the supernatant was collected for cytokine secretion evaluation. FIG. 83D shows level of bound IL-18 in TDS across indications are above the level required for in vitro T cell activation. Tumor biopsies were dissociated, supernatants were collected and analyzed using free and total IL-18 ELISA assays. IL-18BP bound IL-18 levels were calculated by deducting free IL-18 from total IL-18 measured for each sample by two separate ELISA kits. Dashed red line represent the level required for functional activity (1.5 ng/gr).

[0398] FIGS. 84A-84B show anti-IL18BP Ab, high affinity Ab against IL-18BP, released IL-18 to enhance T cell activity in vitro. FIG. 84A shows anti-IL18BP Ab (10 μg/ml) displaced IL-18 from preformed IL-18:IL-18BP complex to increase IFNγ and TNFαrelease from stimulated human CD8+TILs (N=3-4) in TILs-tumor cells co-culture assay in the presence of rIL-18BP and rIL-18. FIG. 84B shows anti-IL18BP Ab increased IFNγ, TNFα, GZMB, and TL-2 release by human tumor dissociated cells. Resected cancer specimens dissociated to single-cell suspension were cultured with anti-CD3/anti-CD28 mAbs for T-cell stimulation and treated with Anti-IL18BP Ab, anti-PD1 Ab (pembrolizumab) or with combination of Anti-IL18BP Ab+Pembrolizumab (10 μg/ml). After 3 days, cytokines and Granzyme secretion were measured in supernatants. Representative example from a human ovarian TDC sample is shown.

[0399] FIGS. 85A-85D show anti-mouse IL-18BP Ab inhibited tumor growth across murine syngeneic tumor models as a single agent and in combination with anti-PD-L1. A-C. Anti-mouse IL-18BP Ab (15 mg/kg) inhibited tumor growth and increased survival as a single agent in MC380VA^{dim} (Treatment initiated in 130-260 mm³ or 330 mm³ tumor volume) (FIG. 85A), E0771 (Treatment initiated in 250-270 mm³ or 330 mm³ tumor volume) (FIG. 85B), and B16F10-hmgp100 (Treatment initiated on day 4 post tumor inoculation) (FIG. 85C) mouse tumor models compared to isotype control. Tumors were inoculated in C57Bl/6 mice; mice (N=10) were treated twice a week for total of 6 treatments. FIG. 85D shows anti-mouse IL-18BP (15 mg/kg) synergized with anti PD-L1 Ab (5 mg/kg) to inhibit tumor growth in E0771 tumor model. Treatment initiated in established tumor (330 mm³, N=10) and was given twice a week for a total of 6 treatments. Tumor volumes are represented as the Mean volume+SEM.

[0400] FIGS. 86A-86F show IL-18BP blockade increased T cell effector state and clonal expansion in E0771 mouse tumor model. C57BL/6 mice were orthotopically inoculated with E0771 cells and treated with anti-IL-18BP Ab or isotype control (15 mg/kg) at tumor volume of 330 mm³ twice a week. Tumors were collected 24 hr post the third treatment and dissociated. Immune modulation was assessed by flow and scRNA sequencing. FIG. 86A: anti-IL-18BP Ab increased CD3+, CD8+ and CD4+ T cells infiltration into the tumor. FIG. 86B: anti-IL-18BP Ab increased T cell polyfunctionality as evident by increase in IFNg+, IL-2+, GrB+ and GrB+IFNg+CD8+ T cells. FIG. 86C: UMAP projection showing T and NK cells present in E0771 tumors treated with anti-IL-18BP or isotype control. FIG. 86D: visualization of the average cell density within the anti-IL-18BP (bottom) and Isotype control (top) group, using embedding density estimation on T/NK UMAP. Darker colors correspond to denser regions.

[0401] FIG. 86E, Log2 fold change of T cell subpopulations comparing anti-IL-18BP Ab treatment to the control group. Only populations with significant changes are depicted. FIG. 86F: quantification of clonal expansion frequencies in anti-IL-18BP Ab treatment compared to the control group.

[0402] FIGS. 87A-87D show IL-18BP blockade increased proinflammatory cytokine secretion and skewed myeloid cells to favor proinflammatory state in E0771 mouse tumor model. C57BL/6 mice were orthotopically inoculated with E0771 cells and treated with anti-IL-18BP Ab or isotype control (15 mg/kg) at tumor volume of 330 mm³ twice a week. Tumors were collected 24 hr post the third treatment and dissociated. Immune modulation was assessed by cytokine profiling and scRNA sequencing. FIG. 87A: anti-IL-18BP Ab increased IFNγ, TNFα, IL-12p70, CXCL9 and MIP-1a secretion and decreased IL-1b secretion. FIG. 87B: UMAP projection showing tumor-associated monocyte and macrophage subpopulations present in E0771 tumors treated with anti-IL-18BP or isotype control. FIG. 87C: visualization of the average cell density within the anti-IL-18BP (bottom) and Isotype control (top) group, using embedding density estimation on tumor-associated monocyte and macrophage UMAP. Darker colors correspond to denser regions. FIG. 87D: Log² fold change of monocyte and macrophage subpopulations comparing anti-IL-18BP Ab treatment to the control group. Only populations with notable changes are depicted.

[0403] FIGS. 88A-88C show anti-mouse IL-18BP Ab alters the immune infiltrate composition of MC380VA^{dim} tumors without affecting the periphery. MC380VA^{dim} tumors were inoculated in C57Bl/6 mice. At tumor volume of 120 mm³ mice were randomized and treated either with anti-IL-18BP Ab or with isotype control (15 mg/kg) twice a week for a total of 4 treatments. Tumors and spleen were harvested 24 hours after the 4th treatment and immune composition was examined. Tumor supernatants and blood serum were collected at the same timepoint and analyzed for cytokine concentrations. A-C. Anti-mouse IL-18BP Ab affected immune composition and cytokine concentrations in the TME (FIG. 88A), but not in the spleen (FIG. 88B) and in the serum (FIG. 88C).

[0404] FIG. 89 shows anti-IL18BP Ab, a potential first-in-class anti-IL-18BP blocker antibody that unleashes endogenous IL-18 in the TME. IL-18 is an effector cytokine that is upregulated in the TME and secreted upon inflammasome activation. IL-18BP is secreted via an IL-18 negative feedback mechanism, Binds IL-18, and blocks its immune stimulatory activity. Anti-IL18BP Ab, high affinity IL-18BP blocker Ab has the potential to Induce potent anti-tumor responses and pronounced TME-constrained immune modulation.

[0405] FIGS. 90A-90C show the effect of CD4, CD8+ or NK cell depletion on single agent activity of anti-IL-18BP Ab in MC38OVA^{dim} tumor model: Groups of 10 C57BL/6 mice were inoculated with MC380VA^{dim} tumor cells. Mice were administered with depletion mAb and with anti-IL-18BP Ab or isotype control followed by 5 additional doses. Tumor volume represented as the mean volume±SEM and Kaplan-Meier survival curves for CD8+ T cells depleted mice (FIG. 90A), CD4+ T cells depleted mice (FIG. 90B), and NK cells depleted mice (FIG. 90C).

[0406] FIGS. 91A-91D show the efficacy of IL-18BP depends on immune composition in the TME (FIGS. 91A-91B) 4T1 (FIG. 91A), and LLC (FIG. 91B) mouse tumor cells were inoculated in BALB/c or C57Bl/6 mice, respectively. On day 4 post inoculation, mice were randomized (n=10 per group) and treated either with anti-IL-18BP Ab or with isotype control (15 mg/kg) twice a week for total of 6 treatments. Tumor volumes are represented as the Mean volume±SEM. Kaplan-Meier. FIG. 91C: E0771, MC380VA^{dim}, B16/Db-hmgp100, CT26, 4T1, and LLC tumors were dissociated by gentleMACS using mouse dissociation kit. Dissociated tumor cells were blocked with a cocktail of anti-CD16, anti-CD32 and anti-CD64 Abs to block nonspecific binding to Fcγ receptors and stained with a target Ab or isotype control cocktail to measure the percentage of CD8+ T and NK cells in each sample. Samples were acquired on a Fortessa X-20 flow cytometer. FIG. 91D: the immune composition of E0771, MC380VA^{dim}, B16/Db-hmgp100, CT26, 4T1, and LLC was compared to the degree of anti-tumor activity induced by IL-18BP blockade.

[0407] FIGS. 92A and 92B show IL-18 expression is upregulated in tumor compared with normal adjacent tissue. Tumor biopsies, and normal tissues adjacent to the tumors (NATs) from cancer patients were analyzed. Tumor biopsies and NATs were dissociated concurrently, and supernatants were collected. Bound-IL-18 and IL-18 protein levels were analyzed using ELISA kits. (FIG. 92A) IL-18 expression in 17 matched NAT and tumor derived supernatant samples (FIG. 92B) Levels of IL-18BP bound IL-18 in 7 matched NAT and tumor derived supernatant samples. IL-18BP bound IL-18 levels were calculated by deducting IL-18 free from total IL-18 measured for each sample by two separate ELISA kits.

[0408] FIGS. 93A-93B depict the resulting polypeptide fragments of hIL-18BP digested with Nep2 protease (FIG. 93A) or pepsin protease (FIG. 93B), respectively, when detected by mass spectrometry, which are mapped against full length hIL-18BP. The hIL-18BP is secreted hIL-18BP (SEQ ID NO: 255) whose C terminus is fused to a His-tag.

[0409] FIGS. 94A-94B depict the hydrogen-deuterium exchange levels mapped to the amino acid sequence of hIL-18BP, based on Nep2 proteolysis (FIG. 94A) and pepsin proteolysis (FIG. 94B), respectively, prior to mass spectrometry. Areas with reduced hydrogen-deuterium exchange are shaded darker. The hIL-18BP is secreted hIL-18BP (SEQ ID NO: 255) whose C terminus is fused to a His-tag.

[0410] FIG. 95 depicts the mapping of HDX-MS results onto an alpha-fold prediction structure of hIL-18BP (AF-O95998-F1). Dark regions indicate ADI-71739 epitope.

[0411] FIG. 96A depicts the mapping of the ADI-71739 epitope region onto a solved crystal structure of IL-18BP bound to IL-18 (PDB ID: 7AL7), along with the binding site (Detry et al., Journal of Biological Chemistry, 298(5):101908 (2022)). The structure on the left: IL-18 BP; the structure on the right: IL-18. The antibody binding sites (epitopes of ADI-71739), IL-18/IL-18 BP interaction sites, and shared sites are indicated by arrows respectively.

[0412] FIG. 96B depicts another angle of the mapping (left) in FIG. 96A, and the enlarged view of the tertiary epitope formed by regions 1 and 6.

[0413] FIG. 97 depicts alignment of IL-18BP isoform a (query) and isoforms b, c, and d. Bottom bars denote regions 1 and 6 that comprise the epitope of ADI-71739.

[0414] FIGS. 98A-98C depict alignments of the amino acid sequences between IL-18BP isoform a (SEQ ID NO: 254) and isoform c (SEQ ID NO: 1922) (FIG. 98A), isoform a and isoform d (SEQ ID NO: 1923) (FIG. 98B), and isoform a and isoform b (SEQ ID NO: 1921) (FIG. 98C). The boxed sequences in FIGS. 98A and 98B are the epitope sequences of ADI-71739.

[0415] FIGS. 99A-99C show the amino acid sequences of full length IL-18BP isoform b (FIG. 99A), full length IL-18BP isoform c (FIG. 99A), and full length IL-18BP isoform d (FIG. 99C). The N terminal signaling peptide is underlined.

### DETAILED DESCRIPTION OF THE INVENTION

### I. Introduction

### A. Interleukin 18 Binding Protein

[0416] The present invention provides antibodies that specifically bind to interleukin 18 binding protein (IL18-BP). “Protein” in this context is used interchangeably with “polypeptide” and includes peptides as well. The present invention provides antibodies that specifically bind to IL18-BP.

[0417] The IL18-BP gene is localized to the human chromosome 11, and no exon coding for a transmembrane domain could be found in the 8.3 kb genomic sequence comprising the IL18-BP gene. Four isoforms of IL18-BP generated by alternative mRNA splicing have been identified in humans so far. They were designated IL18-BP a, b, c, and d, all sharing the same N-terminus and differing in the C-terminus (Novick, D. et al., Immunity, 10:127-136, (1999)). These isoforms vary in their ability to bind IL18 (Kim, S.-H. et al., PNAS, 97(3): 1190-1195 (2000)). Of the four human IL18-BP (hIL18-BP) isoforms, isoforms a and c are known to have a neutralizing capacity for IL18. The most abundant IL18-BP isoform, isoform a, exhibits a high affinity for IL18 with a rapid on-rate and a slow off-rate, and a dissociation constant (K_{d}) of approximately 0.4 nM (Kim, S.-H. et al., PNAS, 97(3): 1190-1195 (2000)). Others have reported that the affinity of IL18-BP to IL-18 is approximately ˜1 pM or ˜25 pM (Zhou T. et al., Nature, 583(7817): 609-614, (2020), Girard C. et al., Rheumatology 2016; 55:2237-2247 (2016)) IL18-BPb and IL18-BPd isoforms lack a complete Ig domain and lack the ability to bind or neutralize IL18. Two mouse isoforms of IL18-BP, resulting from mRNA splicing and found in various cDNA libraries and have been expressed, purified, and assessed for binding and neutralization of IL18 biological activities (Kim, S.-H. et al., PNAS, 97(3): 1190-1195 (2000)). Human and mouse IL18-BP share 60.8% amino acid similarity. Murine IL18-BPc and IL18-BPd isoforms, possessing the identical Ig domain, also neutralize >95% murine IL18 at a molar excess of two. However, murine IL18-BPd, which shares a common C-terminal motif with human IL18-BPa, also neutralizes human IL18. Molecular modeling identified a large mixed electrostatic and hydrophobic binding site in the Ig domain of IL18-BP, which could account for its high affinity binding to the ligand (Kim, S.-H. et al., PNAS, 97(3): 1190-1195 (2000)).

[0418] IL18-BP is a secreted protein of 194 amino acids in length, with a signal peptide (spanning from amino acid 1 to 30), and a secreted chain (spanning from amino acid 41 to 171) and 4 potential N-glycosylation sites but no transmembrane domains. The full length human IL18-BP isoform a protein is shown in FIG. 28A (SEQ ID NO:254). The full length human IL18-BP isoform b protein is shown in FIG. 99A (SEQ ID NO:1921). The full length human IL18-BP isoform c protein is shown in FIG. 99B (SEQ ID NO:1922). The full length human IL18-BP isoform d protein is shown in FIG. 99C (SEQ ID NO:1923). The present invention provides formulations comprising antibodies that specifically bind to IL18-BP proteins. “Protein” in this context is used interchangeably with “polypeptide”, and includes peptides as well. The present invention provides antibodies that specifically bind to IL18-BP proteins. IL18-BP is a secreted protein of 194 amino acids in length, with a signal peptide (spanning from amino acid 1 to 30), and a secreted chain (spanning from amino acid 41 to 171). The N-terminal signaling peptide is underlined in FIGS. 99A-99C, and shaded in FIG. 28A.

[0419] Accordingly, as used herein, the term “IL18 BP”, “IL-18BP”, “IL18BP”, “IL18-BP”, “IL18 binding protein”, or “Interleukin 18 binding protein” may optionally include any such protein, or variants, conjugates, or fragments thereof, including but not limited to known or wild type IL18-BP, as described herein, as well as any naturally occurring splice variants, amino acid variants or isoforms. The term of IL18-BP is used interchangeably with “IL18 binding protein”, “Interleukin 18 binding protein”, “IL18 BPa”, “interleukin-18-binding protein isoform a”, “interleukin-18 binding protein isoform a precursor”, The term “soluble” form of IL18-BP is also used interchangeably with the terms “IL18 BP soluble” or “fragments of IL18-BP polypeptides”, which may refer broadly to one or more of the following optional polypeptides. The term “soluble” with regard to the form of IL18-BP is also used interchangeably with the terms “secreted” as well as “fragments of IL18-BP polypeptides”, which may refer broadly to one or more of the IL18-BP polypeptides disclosed herein.

[0420] IL18-BP is constitutively expressed in the spleen and belongs to the immunoglobulin superfamily. The residues involved in the interaction of IL18 with IL18-BP have been described through the use of computer modelling (Kim, S.-H. et al., PNAS, 97(3): 1190-1195 (2000)) and based on the interaction between the similar protein IL-10 with the IL-1R type I (Vigers, G. P. A. et al., Nature, 386:190-194 (1997)). IL18-BP functions as an inhibitor of the proinflammatory cytokine, IL18. IL-18 modulates immune system functions including induction of IFNγ production, Th1 differentiation, NK cell activation, and cytotoxic T lymphocytes (CTL) responses (Tominaga, K., et al., International Immunology, 12(2): 151-160 (2000) and Senju, H., et al., Into J Biol Sci., 14(3):331-340 (2018)). IL18-BP binds IL18, prevents the binding of IL18 to its receptor, and thus inhibits IL18 induced T and NK cell activation and proliferation, and pro-inflammatory cytokine production, resulting in reduced T and NK cell activity and T-helper type 1 immune responses. IL18-BP abolishes IL18 induction of IFN-γ and IL18 activation of NF-xB in vitro. In addition, IL18-BP inhibits induction of IFN-7 in mice injected with LPS terminus (Novick, D. et al., Immunity, 10:127-136, (1999)).

[0421] IL18 is constitutively present in many cells (Puren et al., PNAS, 96:2256-2261 (1999)) and circulates in healthy humans (Urushihara et al. 2000), representing a unique phenomenon in cytokine biology. Due to the high affinity of IL18 to IL18-BP (Kd˜1 pM) as well as the high concentration of IL18-BP found in the circulation (20-fold molar excess over IL18), it has been hypothesized that most, if not all of the IL18 molecules in the circulation are bound to IL18-BP. Thus, the circulating IL18-BP that competes with cell surface receptors for IL18 may act as a natural anti-inflammatory and an immunosuppressive molecule.

[0422] According to at least some embodiments of the invention, the anti-IL18-BP antibodies (including antigen-binding fragments) that bind to IL18-BP and block the interaction of IL18 and IL18-BP, thereby releasing increased levels of free IL18 are used to enhance T cells, NK cells, NKT cells, Myeloid cells, Dendritic cells, MAIT T cells, 76 T cells, and/or innate lymphoid cells (ILCs) activation, proliferation, cytokines and/or chemokines secretion, and can be used in treating diseases such as cancer and pathogen infection. These anti-IL18-BP antibodies find use in treating diseases such as cancer.

[0423] Accordingly, the invention provides anti-IL18-BP antibodies as provided in FIGS. 1, 2, and/or 3 (e.g., including anti-IL18-BP antibodies including those with CDRs identical to those shown in FIGS. 1, 2, and/or 3). IL18-BP, also called Interleukin-18 binding protein, UniProtKB/Swiss-Prot (095998) or HGNC (5987) NCBI Entrez Gene (10068), relates to amino acid and nucleic acid sequences shown in RefSeq accession identifier: NG_029021.1, NM_001039659.1, NP_001034748.1, NC_000011.10 Chromosome 11 Reference GRCh38.p13 Primary Assembly accession identifier: NM_001039660.2 and NP_001034749.1 and NC_000011.9 Chromosome 11 Reference GRCh38.p13 Primary Assembly accession identifier: NP_001034748.1, NM 001039659.2, NP 005690.2NM_005699.3 NP_001034748.1NM 001039659.2, NP_005690.2, NM 005699.3, NP_001138529.1 NM 001145057.1, NP 001138527.1, NM_001145055.1. In some embodiments, the antibodies of the invention are specific for the IL18-BP.

### II. Anti-IL18-Bp Antibodies

[0424] Accordingly, the invention provides anti-IL18-BP antibodies as provided in FIGS. 1, 2 and 3 (e.g., including anti-IL18-BP antibodies including those with CDRs identical to those shown in FIGS. 1, 2, and/or 3), as well as antibodies that compete for binding with the antibodies enumerated in FIGS. 1, 2, and/or 3.

[0425] As is discussed below, the term “antibody” is used generally. Antibodies that find use in the present invention can take on a number of formats as described herein, including traditional antibodies as well as antibody derivatives, fragments and mimetics, described below. In general, the term “antibody” includes any polypeptide that includes at least one antigen binding domain, as more fully described below. Antibodies may be polyclonal, monoclonal, xenogeneic, allogeneic, syngeneic, or modified forms thereof, as described herein, with monoclonal antibodies finding particular use in many embodiments. In some embodiments, antibodies of the invention bind specifically or substantially specifically to IL18-BP molecules. The terms “monoclonal antibodies” and “monoclonal antibody composition”, as used herein, refer to a population of antibody molecules that contain only one species of an antigen-binding site capable of immunoreacting with a particular epitope of an antigen, whereas the term “polyclonal antibodies” and “polyclonal antibody composition” refer to a population of antibody molecules that contain multiple species of antigen-binding sites capable of interacting with a particular antigen. A monoclonal antibody composition typically displays a single binding affinity for a particular antigen with which it immunoreacts.

[0426] Traditional full length antibody structural units typically comprise a tetramer. Each tetramer is typically composed of two identical pairs of polypeptide chains, each pair having one “light” (typically having a molecular weight of about 25 kDa) and one “heavy” chain (typically having a molecular weight of about 50-70 kDa). Human light chains are classified as kappa and lambda light chains. The present invention is directed to the IgG class, which has several subclasses, including, but not limited to IgG1, IgG2, IgG3, and IgG4. Thus, “isotype” as used herein is meant any of the subclasses of immunoglobulins defined by the chemical and antigenic characteristics of their constant regions. While the exemplary antibodies herein designated “CPA” are based on IgG1 heavy constant regions, as shown in FIG. 4, the anti-IL18-BP antibodies of the invention include those using IgG2, IgG3 and IgG4 sequences, or combinations thereof. For example, as is known in the art, different IgG isotypes have different effector functions which may or may not be desirable. Accordingly, the CPA antibodies of the invention can also swap out the IgG1 constant domains for IgG2, IgG3 or IgG4 constant domains (depicted in FIG. 1E), with IgG2 and IgG4 finding particular use in a number of situations, for example for ease of manufacture or when reduced effector function is desired, the latter being desired in some situations.

[0427] The amino-terminal portion of each chain includes a variable region of about 100 to 110 or more amino acids primarily responsible for antigen recognition, generally referred to in the art and herein as the “Fv domain” or “Fv region”. In the variable region, three loops are gathered for each of the V domains of the heavy chain and light chain to form an antigen-binding site. Each of the loops is referred to as a complementarity-determining region (hereinafter referred to as a “CDR”), in which the variation in the amino acid sequence is most significant. “Variable” refers to the fact that certain segments of the variable region differ extensively in sequence among antibodies. Variability within the variable region is not evenly distributed. Instead, the V regions consist of relatively invariant stretches called framework regions (FRs) of 15-30 amino acids separated by shorter regions of extreme variability called “hypervariable regions”.

[0428] Each VH and VL is composed of three hypervariable regions (“complementary determining regions,” “CDRs”) and four FRs, arranged from amino-terminus to carboxy-terminus in the following order: FR1-CDR1-FR2-CDR2-FR3-CDR3-FR4.

[0429] The hypervariable region generally encompasses amino acid residues from about amino acid residues 24-34 (LCDR1; “L” denotes light chain), 50-56 (LCDR2) and 89-97 (LCDR3) in the light chain variable region and around about 31-35B (HCDR1; “H” denotes heavy chain), 50-65 (HCDR2), and 95-102 (HCDR3) in the heavy chain variable region, although sometimes the numbering is shifted slightly as will be appreciated by those in the art; Kabat et al., SEQUENCES OF PROTEINS OF IMMUNOLOGICAL INTEREST, 5 th Ed. Public Health Service, National Institutes of Health, Bethesda, Md. (1991) and/or those residues forming a hypervariable loop (e.g. residues 26-32 (LCDR1), 50-52 (LCDR2) and 91-96 (LCDR3) in the light chain variable region and 26-32 (HCDR1), 53-55 (HCDR2) and 96-101 (HCDR3) in the heavy chain variable region; Chothia and Lesk (1987) J. Mol. Biol. 196:901-917. Specific CDRs of the invention are described below and shown in FIGS. 6A-6D.

[0430] The carboxy-terminal portion of each chain defines a constant region primarily responsible for effector function. Kabat et al. collected numerous primary sequences of the variable regions of heavy chains and light chains. Based on the degree of conservation of the sequences, they classified individual primary sequences into the CDR and the framework and made a list thereof (see SEQUENCES OF IMMUNOLOGICAL INTEREST, 5 th edition, NIH publication, No. 91-3242, E. A. Kabat et al., entirely incorporated by reference).

[0431] In the IgG subclass of immunoglobulins, there are several immunoglobulin domains in the heavy chain. By “immunoglobulin (Ig) domain” herein is meant a region of an immunoglobulin having a distinct tertiary structure. Of interest in the present invention are the heavy chain domains, including, the constant heavy (CH) domains and the hinge domains. In the context of IgG antibodies, the IgG isotypes each have three CH regions. Accordingly, “CH” domains in the context of IgG are as follows: “CH1” refers to positions 118-220 according to the EU index as in Kabat. “CH2” refers to positions 237-340 according to the EU index as in Kabat, and “CH3” refers to positions 341-447 according to the EU index as in Kabat.

[0432] Accordingly, the invention provides variable heavy domains, variable light domains, heavy constant domains, light constant domains and Fc domains to be used as outlined herein. By “variable region” as used herein is meant the region of an immunoglobulin that comprises one or more Ig domains substantially encoded by any of the Vx or VW, and/or VH genes that make up the kappa, lambda, and heavy chain immunoglobulin genetic loci respectively. Accordingly, the variable heavy domain comprises vhFR1-vhCDR1-vhFR2-vhCDR2-vhFR3-vhCDR3-vhFR4, and the variable light domain comprises vlFR1-vlCDR1-vlFR2-vlCDR2-vlFR3-vlCDR3-vlFR4. By “heavy constant region” herein is meant the CH1-hinge-CH2-CH3 portion of an antibody. By “Fc” or “Fc region” or “Fc domain” as used herein is meant the polypeptide comprising the constant region of an antibody excluding the first constant region immunoglobulin domain and in some cases, part of the hinge. Thus Fc refers to the last two constant region immunoglobulin domains of IgA, IgD, and IgG, the last three constant region immunoglobulin domains of IgE and IgM, and the flexible hinge N-terminal to these domains. For IgA and IgM, Fc may include the J chain. For IgG, the Fc domain comprises immunoglobulin domains Cγ2 and Cγ3 (Cγ2 and Cγ3) and the lower hinge region between Cγ1 (Cγ1) and Cγ2 (Cγ2). Although the boundaries of the Fc region may vary, the human IgG heavy chain Fc region is usually defined to include residues C226 or P230 to its carboxyl-terminus, wherein the numbering is according to the EU index as in Kabat. In some embodiments, as is more fully described below, amino acid modifications are made to the Fc region, for example to alter binding to one or more FcγR receptors or to the FcRn receptor.

[0433] Thus, “Fc variant” or “variant Fc” as used herein is meant a protein comprising an amino acid modification in an Fc domain. The Fc variants of the present invention are defined according to the amino acid modifications that compose them. Thus, for example, N434S or 434S is an Fc variant with the substitution serine at position 434 relative to the parent Fc polypeptide, wherein the numbering is according to the EU index. Likewise, M428L/N434S defines an Fc variant with the substitutions M428L and N434S relative to the parent Fc polypeptide. The identity of the WT amino acid may be unspecified, in which case the aforementioned variant is referred to as 428L/434S. It is noted that the order in which substitutions are provided is arbitrary, that is to say that, for example, 428L/434S is the same Fc variant as M428L/N434S, and so on. For all positions discussed in the present invention that relate to antibodies, unless otherwise noted, amino acid position numbering is according to the EU index.

[0434] By “Fab” or “Fab region” as used herein is meant the polypeptide that comprises the VH, CH1, VL, and CL immunoglobulin domains. Fab may refer to this region in isolation, or this region in the context of a full length antibody, antibody fragment or Fab fusion protein. By “Fv” or “Fv fragment” or “Fv region” as used herein is meant a polypeptide that comprises the VL and VH domains of a single antibody. As will be appreciated by those in the art, these generally are made up of two chains.

[0435] Throughout the present specification, either the IMTG numbering system or the Kabat numbering system is generally used when referring to a residue in the variable domain (approximately, residues 1-107 of the light chain variable region and residues 1-113 of the heavy chain variable region) (e.g., Kabat et al., supra (1991)). EU numbering as in Kabat is generally used for constant domains and/or the Fc domains.

[0436] The CDRs contribute to the formation of the antigen-binding, or more specifically, epitope binding site of antibodies. “Epitope” refers to a determinant that interacts with a specific antigen binding site in the variable region of an antibody molecule known as a paratope. Epitopes are groupings of molecules such as amino acids or sugar side chains and usually have specific structural characteristics, as well as specific charge characteristics. A single antigen may have more than one epitope.

[0437] The epitope may comprise amino acid residues directly involved in the binding (also called immunodominant component of the epitope) and other amino acid residues, which are not directly involved in the binding, such as amino acid residues which are effectively blocked by the specifically antigen binding peptide; in other words, the amino acid residue is within the footprint of the specifically antigen binding peptide.

[0438] Epitopes may be either conformational or linear. A conformational epitope is produced by spatially juxtaposed amino acids from different segments of the linear polypeptide chain. A linear epitope is one produced by adjacent amino acid residues in a polypeptide chain. Conformational and nonconformational epitopes may be distinguished in that the binding to the former but not the latter is lost in the presence of denaturing solvents.

[0439] An epitope typically includes at least 3, and more usually, at least 5 or 8-10 amino acids in a unique spatial conformation. Antibodies that recognize the same epitope can be verified in a simple immunoassay showing the ability of one antibody to block the binding of another antibody to a target antigen, for example “binning”. Specific bins are described below.

[0440] Included within the definition of “antibody” is an “antigen-binding portion” of an antibody (also used interchangeably with “antigen-binding fragment”, “antibody fragment” and “antibody derivative”). That is, for the purposes of the invention, an antibody of the invention has a minimum functional requirement that it bind to a IL18-BP antigen. As will be appreciated by those in the art, there are a large number of antigen fragments and derivatives that retain the ability to bind an antigen and yet have alternative structures, including, but not limited to, (i) the Fab fragment consisting of VL, VH, CL and CH1 domains, (ii) the Fd fragment consisting of the VH and CH1 domains, (iii) F(ab′)2 fragments, a bivalent fragment comprising two linked Fab fragments (vii) single chain Fv molecules (scFv), wherein a VH domain and a VL domain are linked by a peptide linker which allows the two domains to associate to form an antigen binding site (Bird et al., 1988, Science 242:423-426, Huston et al., 1988, Proc. Natl. Acad. Sci. U.S.A. 85:5879-5883, entirely incorporated by reference), (iv) “diabodies” or “triabodies”, multivalent or multispecific fragments constructed by gene fusion (Tomlinson et. al., 2000, Methods Enzymol. 326:461-479; WO94/13804; Holliger et al., 1993, Proc. Natl. Acad. Sci. U.S.A. 90:6444-6448, all entirely incorporated by reference), (v) “domain antibodies” or “dAb” (sometimes referred to as an “immunoglobulin single variable domain”, including single antibody variable domains from other species such as rodent (for example, as disclosed in WO 00/29004), nurse shark and Camelid V-HH dAbs, (vi) SMIPs (small molecule immunopharmaceuticals), camelbodies, nanobodies and IgNAR.

[0441] Still further, an antibody or antigen-binding portion thereof (antigen-binding fragment, antibody fragment, antibody portion) may be part of a larger immunoadhesion molecules (sometimes also referred to as “fusion proteins”), formed by covalent or noncovalent association of the antibody or antibody portion with one or more other proteins or peptides. Examples of immunoadhesion molecules include use of the streptavidin core region to make a tetrameric scFv molecule and use of a cysteine residue, a marker peptide and a C-terminal polyhistidine tag to make bivalent and biotinylated scFv molecules. Antibody portions, such as Fab and F(ab′)₂ fragments, can be prepared from whole antibodies using conventional techniques, such as papain or pepsin digestion, respectively, of whole antibodies. Moreover, antibodies, antibody portions and immunoadhesion molecules can be obtained using standard recombinant DNA techniques, as described herein.

[0442] In general, the anti-IL18-BP antibodies of the invention are recombinant. “Recombinant” as used herein, refers broadly with reference to a product, e.g., to a cell, or nucleic acid, protein, or vector, indicates that the cell, nucleic acid, protein or vector, has been modified by the introduction of a heterologous nucleic acid or protein or the alteration of a native nucleic acid or protein, or that the cell is derived from a cell so modified. Thus, for example, recombinant cells express genes that are not found within the native (non-recombinant) form of the cell or express native genes that are otherwise abnormally expressed, under expressed or not expressed at all.

[0443] The term “recombinant antibody”, as used herein, includes all antibodies that are prepared, expressed, created or isolated by recombinant means, such as (a) antibodies isolated from an animal (e.g., a mouse) that is transgenic or transchromosomal for human immunoglobulin genes or a hybridoma prepared therefrom (described further below), (b) antibodies isolated from a host cell transformed to express the human antibody, e.g., from a transfectoma, (c) antibodies isolated from a recombinant, combinatorial human antibody library, and (d) antibodies prepared, expressed, created or isolated by any other means that involve splicing of human immunoglobulin gene sequences to other DNA sequences. Such recombinant human antibodies have variable regions in which the framework and CDR regions are derived from human germline immunoglobulin sequences. In certain embodiments, however, such recombinant human antibodies can be subjected to in vitro mutagenesis (or, when an animal transgenic for human Ig sequences is used, in vivo somatic mutagenesis) and thus the amino acid sequences of the VH and VL regions of the recombinant antibodies are sequences that, while derived from and related to human germline V_{H} and V_{L} sequences, may not naturally exist within the human antibody germline repertoire in vivo.

### A. Anti-IL18-Bp Binding Antibody

[0444] The present invention provides anti-IL18-BP antibodies. (For convenience, “anti-IL18-BP antibodies” and “IL18-BP antibodies” are used interchangeably). The anti-IL18-BP antibodies of the invention specifically bind to human IL18-BP, and preferably the secreted chain of human IL18-BP, as depicted in FIG. 28, including, e.g., anti-IL18-BP antibodies including those with CDRs identical to those shown in FIGS. 1, 2 and 3.

[0445] As noted herein and more fully described below, the anti-IL18-BP antibodies (including antigen-binding fragments) that both bind to IL18-BP and block the interaction of IL18-BP and IL18, thereby releasing increased levels of free IL18, are used to enhance T cells, NK cells, NKT cells, Myeloid cells, dendritic cells, MAIT T cells, 76 T cells, and/or innate lymphoid cells (ILCs) activation, proliferation, cytokines and/or chemokines secretion, and can be used in treating diseases such as cancer and pathogen infection.

[0446] Specific binding for IL18-BP or a IL18-BP epitope can be exhibited, for example, by an antibody having a K_{D} of at least about 10⁻⁵ M, at least about 10⁻⁶ M, at least about 10⁻⁷ M, at least about 10⁻⁸ M, at least about 10⁻⁹ M, alternatively at least about 10⁻¹⁰ M, at least about 10⁻¹¹ M, at least about 10⁻¹² M, at least about 10⁻¹³ M, at least about 10⁻¹⁴ M, or greater, where K_{D} refers to a dissociation rate of a particular antibody-antigen interaction. Typically, an antibody that specifically binds an antigen will have a K_{D} that is 20-, 50-, 100-, 500-, 1000-, 5,000-, 10,000-, 100,000- or more times greater for a control molecule relative to the IL18-BP antigen or epitope.

[0447] However, as supported by the Examples, for optimal binding to IL18-BP, the antibodies preferably have a K_{D} (also referred to as the binding affinity) less than 0.01 nM, less 10 nM and most preferably less than 0.1 pM, with less than 1 pM, less than 0.1 pM, and less than 0.01 pM, finding use in the methods of the invention. In some embodiments, the anti-IL-18BP antibodies exhibit a KD less than 900 pM, less than 850 pM, less than 800 pM, less than 750 pM, less than 700 pM, less than 650 pM, less than 600 pM, less than 550 pM, less than 500 pM, less than 450 pM, less than 400 pM, less than 350 pM, less than 300 pM, less than 250 pM, less than 200 pM, less than 150 pM, less than 100 pM, less than 50 pM, or less than 10 pM. In some embodiments, the anti-IL-18BP antibodies exhibit a K_{D} less than 750 pM. In some embodiments, the anti-IL18-BP antibodies of the invention bind to human IL18-BP with a KD of 50 nM or less, 10 nM or less, or 1 nM or less (that is, higher binding affinity), 100 pM or less, 10 pM or less, 1 pM or less, 0.1 pM or less, or 0.01 pM or less, wherein K_{D} is determined by known methods, e.g., surface plasmon resonance (SPR, e.g., Biacore instrument), ELISA, KinExA, and most typically SPR at 25° C. or 37° C. In some embodiments, the anti-IL18-BP antibodies of the invention bind to human IL18-BP with a K_{D} less than 900 pM, less than 850 pM, less than 800 pM, less than 750 pM, less than 700 pM, less than 650 pM, less than 600 pM, less than 550 pM, less than 500 pM, less than 450 pM, less than 400 pM, less than 350 pM, less than 300 pM, less than 250 pM, less than 200 pM, less than 150 pM, less than 100 pM, less than 50 pM, or less than 10 pM, wherein KD is determined by known methods, e.g., surface plasmon resonance (SPR, e.g., Biacore instrument), ELISA, KinExA, and most typically SPR at 25° C. or 37° C. In some embodiments, the antibodies preferably have a K_{D} or binding affinity less than 0.005 pM, 0.01 pM, 0.02 pM, 0.03 pM, 0.04 pM, 0.05 pM, 0.06 pM, 0.07 pM, 0.08 pM, 0.09 pM, 0.10 pM, 0.15 pM, 0.20 pM, 0.25 pM, 0.30 pM, 0.35 pM, 0.40 pM, 0.45 pM, 0.50 pM, 0.55 pM, 0.60 pM, 0.65 pM, 0.70 pM, 0.75 pM, 0.80 pM, 0.85 pM, 0.90 pM, 0.95 pM, or 1 pM.

[0448] Also, specific binding for a particular antigen or an epitope can be exhibited, for example, by an antibody having a KA or Ka for an IL18-BP antigen or epitope of at least 20-, 50-, 100-, 500-, 1000-, 5,000-, 10,000-, 100,000- or more times greater for the epitope relative to a control, where KA or Ka refers to an association rate of a particular antibody-antigen interaction.

[0449] The invention provides antigen binding domains, including full length antibodies, which contain a number of specific, enumerated sets of 6 CDRs, as provided in FIGS. 1, 2, and/or 3. The invention provides antigen binding domains, including full length antibodies, which contain a number of specific, enumerated sets of 6 CDRs, as provided in FIG. 3.

[0450] The invention further provides variable heavy and light domains as well as full length heavy and light chains.

[0451] As discussed herein, the invention further provides variants of the above components, including variants in the CDRs, as outlined above. In addition, variable heavy chains can be at least 80%, at least 90%, at least 95%, at least 98% or at least 99% identical to the “VH” sequences herein, and/or contain from 1, 2, 3, 4, 5, 6, 7, 8, 9, 10 amino acid changes, or more, when Fc variants are used. Variable light chains are provided that can be at least 80%, at least 90%, at least 95%, at least 98% or at least 99% identical to the “VL” sequences herein, and/or contain from 1, 2, 3, 4, 5, 6, 7, 8, 9, 10 amino acid changes, or more, when Fc variants are used. Similarly, heavy and light chains are provided that are at least 80%, at least 90%, at least 95%, at least 98% or at least 99% identical to the “HC” and “LC” sequences herein, and/or contain from 1, 2, 3, 4, 5, 6, 7, 8, 9, 10 amino acid changes, or more, when Fc variants are used.

[0452] Accordingly, the present invention provides antibodies, usually full length or scFv domains, that comprise the following CHA sets of CDRs, the sequences of which are shown in FIG. 1 through 3.

[0453] The 66650 lineage (VH1-03; VL-kappa-1-5) consensus sequence of CDRs (FIG. 1A) was generated using ADI-71701, ADI-71709, ADI-71710, ADI-71707 and ADI-71717 antibodies. The respective sequence alignment is shown in FIG. 3B.

[0454] The 66650 lineage (VH1-03; VL-kappa-1-5) consensus sequence comprises:
[0455] CDR-H1 having the sequence Y-T-F-X-X2-Y-A-X3-H, wherein X is N, R, D, G or K; X2 is S, H, I or Q; X3 is M or V;
[0456] CDR-H2 having the sequence W-I-H-A-G-T-G-X-T-X2-Y-S-Q-K-F-Q-G, wherein X is N, A or V; X2 is K or L;
[0457] CDR-H3 having the sequence A-R-G-L-G-X-V-G-P-T-G-T-S-W-F-D-P, wherein X is S or E;
[0458] CDR-L1 having the sequence R-A-S-Q-G-I-S-S-W-L-A;
[0459] CDR-L2 having the sequence E-A-S-S-L-E-S; and
[0460] CDR-L3 having the sequence Q-Q-Y-R-X-X2-P-F-T, wherein X is S, V, Y, L or Q; X2 is F, S, or G.

[0461] In some embodiments, the anti-IL18-BP antibody comprises the CDRs:
[0462] CDR-H1 having the sequence Y-T-F-X-X2-Y-A-X3-H, wherein X is N, R, D, G or K; X2 is S,H,I or Q; X3 is M or V;
[0463] CDR-H2 having the sequence W-I-H-A-G-T-G-X-T-X2-Y-S-Q-K-F-Q-G, wherein X is N, A or V; X2 is K or L;
[0464] CDR-H3 having the sequence A-R-G-L-G-X-V-G-P-T-G-T-S-W-F-D-P, wherein X is S or E;
[0465] CDR-L1 having the sequence R-A-S-Q-G-I-S-S-W-L-A;
[0466] CDR-L2 having the sequence E-A-S-S-L-E-S; and
[0467] CDR-L3 having the sequence Q-Q-Y-R-X-X2-P-F-T, wherein X is S, V, Y, L or Q; X2 is F, S, or G.

[0468] The 66670 lineage (VH1-69; VL-kappa-1-12) consensus sequence of CDRs (FIG. 1B) was generated using ADI-71719, ADI-71720, ADI-71722, and ADI-71728 antibodies. The respective sequence alignment is shown in FIG. 3C.

[0469] The 66670 lineage (VH1-69; VL-kappa-1-12) consensus sequence comprises:
[0470] CDR-H1 having the sequence G-T-F-X-X2-Y-X3-I-S, wherein X is S or N; X2 is E or S; X3 is V or P;
[0471] CDR-H2 having the sequence G-I-I-P-G-X2-G-T-A-X3-Y-A-Q-K-F-Q-G, wherein X is G or Y, X2 is A or S; X3 is N, I or V;
[0472] CDR-H3 having the sequence A-R-G-R-H-X-H-E-T, wherein X is S, G or F;
[0473] CDR-L1 having the sequence R-A-S-Q-G-I-S-S-W-L-A;
[0474] CDR-L2 having the sequence A-A-S-S-L-Q-S;
[0475] CDR-L3 having the sequence Q-Q-V-Y-X-X2-P-W-T, wherein X is S or R; X2 is L, I or F.

[0476] In some embodiments, the anti-IL18-BP antibody comprises the CDRs:
[0477] CDR-H1 having the sequence G-T-F-X-X2-Y-X3-I-S, wherein X is S or N; X2 is E or S; X3 is V or P;
[0478] CDR-H2 having the sequence G-I-I-P-G-X2-G-T-A-X3-Y-A-Q-K-F-Q-G, wherein X is G or Y, X2 is A or S; X3 is N, I, or V;
[0479] CDR-H3 having the sequence A-R-G-R-H-X-H-E-T, wherein X is S, G or F;
[0480] CDR-L1 having the sequence R-A-S-Q-G-I-S-S-W-L-A;
[0481] CDR-L2 having the sequence A-A-S-S-L-Q-S; and
[0482] CDR-L3 having the sequence Q-Q-V-Y-X-X2-P-W-T, wherein X is S or R; X2 is L, I, or F.

[0483] The 66692 lineage (VH3-23, VL-kappa-1-12) consensus sequence of CDRs (FIG. 1C) was generated using ADI-71662, ADI-71663 and ADI-66692 antibodies. The respective sequence alignment is shown in FIG. 3A.

[0484] The 66692 lineage (VH3-23, VL-kappa-1-12) consensus sequence comprises:
[0485] CDR-H1 having the sequence F-T-F-X-N-X2-A-M-S, wherein X is G or D or S; X2 is T or V or Y;
[0486] CDR-H2 having the sequence A-I-S-X-X1-X2-G-S-T-Y-Y-A-D-S-V-K-G, wherein X is G or A; X2 is N or S; X3 is A or G;
[0487] CDR-H3 having the sequence A-K-G-P-D-R-Q-V-F-D-Y;
[0488] CDR-L1 having the sequence R-A-S-Q-G-I-X-S-W-L-A, wherein X is S or D;
[0489] CDR-L2 having the sequence A-A-S-S-L-Q-S; and
[0490] CDR-L3 having the sequence Q-H-A-X-X1-F-P-Y-T, wherein X is Y or L; X2 is S or F.

[0491] In some embodiments, the anti-IL18-BP antibody comprises the CDRs:
[0492] CDR-H1 having the sequence F-T-F-X-N-X2-A-M-S, wherein X is G or D or S; X2 is T or V or Y;
[0493] CDR-H2 having the sequence A-I-S-X-X1-X2-G-S-T-Y-Y-A-D-S-V-K-G, wherein X is G or A; X2 is N or S; X3 is A or G;
[0494] CDR-H3 having the sequence A-K-G-P-D-R-Q-V-F-D-Y;
[0495] CDR-L1 having the sequence R-A-S-Q-G-I-X-S-W-L-A, wherein X is S or D;
[0496] CDR-L2 having the sequence A-A-S-S-L-Q-S; and
[0497] CDR-L3 having the sequence Q-H-A-X-X1-F-P-Y-T, wherein X is Y or L; X2 is S or F.

[0498] The 66716 lineage (VH1-39; VL-kappa-1-12) consensus sequence of CDRs (FIG. 1D) was generated using ADI-71736, ADI-71739 and ADI-66716 antibodies. The respective sequence alignment is shown in FIG. 3D.

[0499] The 66716 lineage (VH1-39; VL-kappa-1-12) consensus sequence comprises:
[0500] CDR-H1 having the sequence G-S-I-S-S-X-X2-Y-X3-W-G, wherein X is S or P; X2 is E or D; X3 is G, P or Y;
[0501] CDR-H2 having the sequence S-I-X-X2-X3-G-X4-T-Y-Y-N-P-S-L-K-S, wherein X is Y or V; X2 is Y or N; X3 is Q or S; X4 is S or A;
[0502] CDR-H3 having the sequence A-R-G-P-X-R-Q-X2-F-D-Y, wherein X is Y or H, X2 is V or L;
[0503] CDR-L1 having the sequence R-A-S-Q-G-I-S-S-W-L-A;
[0504] CDR-L2 having the sequence A-A-S-S-L-Q-S; and
[0505] CDR-L3 having the sequence Q-Q-G-X-X2-F-P-Y-T, wherein X is S or F; X2 is S or V.

[0506] In some embodiments, the anti-IL18-BP antibody comprises the CDRs:
[0507] CDR-H1 having the sequence G-S-I-S-S-X-X2-Y-X3-W-G, wherein X is S or P; X2 is E or D; X3 is G, P or Y;
[0508] CDR-H2 having the sequence S-I-X-X2-X3-G-X4-T-Y-Y-N-P-S-L-K-S, wherein X is Y or V; X2 is Y or N; X3 is Q or S; X4 is S or A;
[0509] CDR-H3 having the sequence A-R-G-P-X-R-Q-X2-F-D-Y, wherein X is Y or H, X2 is V or L;
[0510] CDR-L1 having the sequence R-A-S-Q-G-I-S-S-W-L-A;
[0511] CDR-L2 having the sequence A-A-S-S-L-Q-S; and
[0512] CDR-L3 having the sequence Q-Q-G-X-X2-F-P-Y-T, wherein X is S or F; X2 is S or V.

[0513] In some embodiments, the anti-IL18-BP antibody comprises the CDRs:
[0514] CDR-H1 having the sequence Y-T-F-X-X2-Y-A-X3-H, wherein X is any amino acid; X2 is any amino acid; X3 is any amino acid;
[0515] CDR-H2 having the sequence W-I-H-A-G-T-G-X-T-X2-Y-S-Q-K-F-Q-G, wherein X is any amino acid; X2 is any amino acid;
[0516] CDR-H3 having the sequence A-R-G-L-G-X-V-G-P-T-G-T-S-W-F-D-P, wherein X is any amino acid;
[0517] CDR-L1 having the sequence R-A-S-Q-G-I-S-S-W-L-A;
[0518] CDR-L2 having the sequence E-A-S-S-L-E-S; and
[0519] CDR-L3 having the sequence Q-Q-Y-R-X-X2-P-F-T, wherein X is any amino acid; X2 is any amino acid.

[0520] In some embodiments, the anti-IL18-BP antibody comprises the CDRs:
[0521] CDR-H1 having the sequence G-T-F-X-X2-Y-X3-I-S, wherein X is any amino acid; X2 is any amino acid; X3 is any amino acid;
[0522] CDR-H2 having the sequence G-I-I-P-G-X2-G-T-A-X3-Y-A-Q-K-F-Q-G, wherein X is any amino acid, X2 is any amino acid;
[0523] CDR-H3 having the sequence A-R-G-R-H-X-H-E-T, wherein X is any amino acid;
[0524] CDR-L1 having the sequence R-A-S-Q-G-I-S-S-W-L-A;
[0525] CDR-L2 having the sequence A-A-S-S-L-Q-S;
[0526] CDR-L3 having the sequence Q-Q-V-Y-X-X2-P-W-T, wherein X is any amino acid; X2 is any amino acid.

[0527] In some embodiments, the anti-IL18-BP antibody comprises the CDRs:
[0528] CDR-H1 having the sequence G-T-F-X-X2-Y-X3-I-S, wherein X is any amino acid; X2 is any amino acid; X3 is any amino acid;
[0529] CDR-H2 having the sequence G-I-I-P-G-X2-G-T-A-X3-Y-A-Q-K-F-Q-G, wherein X is any amino acid; X2 is any amino acid; X3 is any amino acid;
[0530] CDR-H3 having the sequence A-R-G-R-H-X-H-E-T, wherein X is any amino acid;
[0531] CDR-L1 having the sequence R-A-S-Q-G-I-S-S-W-L-A;
[0532] CDR-L2 having the sequence A-A-S-S-L-Q-S;
[0533] CDR-L3 having the sequence Q-Q-V-Y-X-X2-P-W-T, wherein X is any amino acid; X2 is any amino acid.

[0534] In some embodiments, the anti-IL18-BP antibody comprises the CDRs:
[0535] CDR-H1 having the sequence F-T-F-X-N-X2-A-M-S, wherein X is any amino acid; X2 is any amino acid;
[0536] CDR-H2 having the sequence A-I-S-X-X1-X2-G-S-T-Y-Y-A-D-S-V-K-G, wherein X is any amino acid; X2 is any amino acid; X3 is any amino acid;
[0537] CDR-H3 having the sequence A-K-G-P-D-R-Q-V-F-D-Y;
[0538] CDR-L1 having the sequence R-A-S-Q-G-I-X-S-W-L-A, wherein X is any amino acid;
[0539] CDR-L2 having the sequence A-A-S-S-L-Q-S; and
[0540] CDR-L3 having the sequence Q-H-A-X-X1-F-P-Y-T, wherein X is any amino acid; X2 is any amino acid.

[0541] In some embodiments, the anti-IL18-BP antibody comprises the CDRs:
[0542] CDR-H1 having the sequence G-S-I-S-S-X-X2-Y-X3-W-G, wherein X is any amino acid; X2 is any amino acid; X3 is any amino acid;
[0543] CDR-H2 having the sequence S-I-X-X2-X3-G-X4-T-Y-Y-N-P-S-L-K-S, wherein X is any amino acid; X2 is any amino acid; X3 is any amino acid; X4 is any amino acid;
[0544] CDR-H3 having the sequence A-R-G-P-X-R-Q-X2-F-D-Y, wherein X is any amino acid; X2 is any amino acid;
[0545] CDR-L1 having the sequence R-A-S-Q-G-I-S-S-W-L-A;
[0546] CDR-L2 having the sequence A-A-S-S-L-Q-S; and
[0547] CDR-L3 having the sequence Q-Q-G-X-X2-F-P-Y-T, wherein X is any amino acid; X2 is any amino acid.

[0548] In some embodiments, the antibody comprises:
[0549] i. a heavy chain variable domain, comprising:
   [0550] a) CDR-H1 having the sequence Y-T-F-X-X2-Y-A-X3-H, wherein X is N, R, D, G, T, Q, S, A or K; X2 is S, H, I,N, L, Y or Q; X3 is M or V;
   [0551] b) CDR-H2 having the sequence X-I-X2-A-G-X3-X4-X5-T-X6-Y-S-Q-K-F-Q-G, wherein X is W or Y; X2 is H or N; X3 is S,T or A; X4 is G or A; X5 is N, A, T or V; X6 is E, K or L; and
   [0552] c) CDR-H3 having the sequence A-R-G-L-G-X-V-G-P-T-G-T-S-W-F-D-P, wherein X is S, L, A, K or E; and
[0553] ii. a light chain variable domain, comprising:
   [0554] a) CDR-L1 having the sequence R-A-S-Q-G-I-S-S-W-L-A;
   [0555] b) CDR-L2 having the sequence E-A-S-S--E-S, wherein X is L or S; and
   [0556] c) CDR-L3 having the sequence Q-Q-Y-R-X-X2-P-F-T, wherein X is S, V, Y, L, T or Q; X2 is F, S, Y or G.

[0557] In some embodiments, the antibody comprises:
[0558] i. a heavy chain variable domain, comprising:
   [0559] a) CDR-H1 having the sequence G-T-F-X-X2-Y-X3-I-S, wherein X is S or N; X2 is E or S; X3 is V or P
   [0560] b) CDR-H2 having the sequence G-I-I-P-X-X2-G-T-A-X3-Y-A-Q-K-F-Q-G, wherein X is G, S, I or Y; X2 is A, V or S; X3 is N, I or V; and
   [0561] c) CDR-H3 having the sequence A-R-G-R-H-X-H-E-T, wherein X is S, G, or F; and
[0562] ii. a light chain variable domain, comprising:
   [0563] a) CDR-L1 having the sequence R-A-S-Q-G-I-S-S-W-L-A;
   [0564] b) CDR-L2 having the sequence A-A-S-S-L-Q-S; and
   [0565] c) CDR-L3 having the sequence Q-Q-X-Y-X2-X3-P-W-T, wherein X is V or L; X2 is S or R; X3 is L, I or F.

[0566] In some embodiments, the antibody comprises:
[0567] i. a heavy chain variable domain, comprising:
   [0568] a) CDR-H1 having the sequence F-T-F-X-X2-X3-X4-M-S, wherein X is G, S, P or D or S; X2 is N, S or P; X3 is T, V or Y; X4 is A, H or I;
   [0569] b) a CDR-H2 having the sequence A-I-S-X-X2-X3-X4-X5-T-X6-Y-A-D-S-V-K-G, wherein X is G or A; X2 is N, T, E or S; X3 is A or G; X4 is A or G; X5 is S or G; X6 is Y or F; and
   [0570] c) a CDR-H3 having the sequence A-K-G-P-D-R-Q-V-F-D-Y; and
[0571] ii. a light chain variable domain, comprising:
   [0572] a) a CDR-L1 having the sequence R-A-S-Q-G-I-X-S-W-L-A, wherein X is S or D;
   [0573] b) a CDR-L2 having the sequence A-A-S-S-L-Q-S; and
   [0574] c) a CDR-L3 having the sequence Q-H-X-X2-X3-F-P-Y-T, wherein X is A or G; X2 is Y, R or L; X3 is S, R, L or F.

[0575] In some embodiments, the antibody comprises:
[0576] i. a heavy chain variable domain, comprising:
   [0577] a) CDR-H1 having the sequence G-S-I-X-S-X2-X3-Y-X4-W-X5, wherein X is S or F; X2 is S or P; X3 is E or D; X4 is G,P or Y; X5 is G or S;
   [0578] b) CDR-H2 having the sequence X-I-X2-X3-X4-G-X5-T-Y-Y-N-P-S-L-K-S, wherein X is S or V; X2 is Y, V, F or A; X3 is Y,F or N; X4 is Q, A or S; X5 is S, A or N; and
   [0579] c) CDR-H3 having the sequence A-R-G-P-X-R-Q-X2-F-D-Y, wherein X is Y, H or F; X2 is V or L; and
[0580] ii. a light chain variable domain, comprising:
   [0581] a) CDR-L1 having the sequence R-A-S-Q-G-I-S-S-W-L-A;
   [0582] b) CDR-L2 having the sequence A-A-S-S-L-Q-S; and
   [0583] c) CDR-L3 having the sequence Q-Q-G-X-X2-F-P-Y-T, wherein X is S N, W or F; X2 is S or V.

[0584] The anti-IL18-BP antibodies also comprise framework regions. The framework regions of the variable heavy and variable light chains can be humanized as is known in the art (with occasional variants generated in the CDRs as needed), and thus humanized variants of the VH and VL chains of FIGS. 1, 2, and/or 3 can be generated. Furthermore, the humanized variable heavy and light domains can then be fused with human constant regions, such as the constant regions from IgG1, IgG2, IgG3 and IgG4.

[0585] In addition, also included are sequences that may have the identical CDRs but changes in the variable domain (or entire heavy or light chain). For example, IL18-BP antibodies include those with CDRs identical to those shown in FIGS. 1-3 but whose identity along the variable region can be lower, for example 85%, 88%, 90%, 92%, 95 or 98% percent identical. For example, IL18-BP antibodies include those with CDRs identical to those shown in FIG. 3 but whose identity along the variable region can be lower, for example 95 or 98% percent identical, and in some embodiments at least 95% or at least 98%.

[0586] The percent identity between two amino acid sequences can be determined using the algorithm of E. Meyers and W. Miller (Comput. Appl. Biosci., 4:11-17 (1988)) which has been incorporated into the ALIGN program (version 2.0), using a PAM120 weight residue table, a gap length penalty of 12 and a gap penalty of 4. In addition, the percent identity between two amino acid sequences can be determined using the Needleman and Wunsch (J. Mol. Biol., 48:444-453 (1970)) algorithm which has been incorporated into the GAP program in the GCG software package (available commercially), using either a Blossum 62 matrix or a PAM250 matrix, and a gap weight of 16, 14, 12, 10, 8, 6, or 4 and a length weight of 1, 2, 3, 4, 5, or 6.

[0587] Additionally or alternatively, the protein sequences of the present invention can further be used as a “query sequence” to perform a search against public databases to, for example, identify related sequences. Such searches can be performed using the XBLAST program (version 2.0) of Altschul, et al., J. Mol. Biol. 215:403-10 (1990). BLAST protein searches can be performed with the XBLAST program, score=50, wordlength=3 to obtain amino acid sequences homologous to the antibody molecules according to at least some embodiments of the invention. To obtain gapped alignments for comparison purposes, Gapped BLAST can be utilized as described in Altschul et al., Nucleic Acids Res., 25(17):3389-3402 (1997). When utilizing BLAST and Gapped BLAST programs, the default parameters of the respective programs (e.g., XBLAST and NBLAST) can be used.

[0588] In general, the percentage identity for comparison between IL18-BP antibodies is at least 75%, at least 80%, at least 90%, with at least about 95, 96, 97, 98 or 99% percent identity being preferred. The percentage identity may be along the whole amino acid sequence, for example the entire heavy or light chain or along a portion of the chains. For example, included within the definition of the anti-IL18-BP antibodies of the invention are those that share identity along the entire variable region (for example, where the identity is 95 or 98% identical along the variable regions, and in some embodiments at least 95% or at least 98%), or along the entire constant region, or along just the Fc domain.

### B. Specific Anti-IL18-BP Antibodies

[0589] The invention provides antigen binding domains, including full length antibodies, which contain a number of specific, enumerated sets of 6 CDRs, as well as consensus CDRs (see, e.g., those listed in FIGS. 1A-1D).

[0590] The antibodies described herein are labeled as follows. The antibodies have reference numbers, for example “66650 lineage (VH1-03; VL-kappa-1-5)” or “VH1-03” or “ADI-71663 hIgG4 S228P kappa”. This represents the combination of the CDRs and/or the variable heavy and variable light chains, as depicted in FIGS. 1, 2, and/or 3. “ADI-71663.VH” refers to the variable heavy portion of ADI-71663 hIgG4 S228P kappa, while “ADI-71663.VL” is the variable light chain. “ADI-71663.vhCDR1”, “ADI-71663.vhCDR2”, “ADI-71663.vhCDR3”, “ADI-71663.vlCDR1”, “ADI-71663.vlCDR2”, and “ADI-71663.vlCDR3”, refers to the CDRs are indicated. “ADI-71663.HC” refers to the entire heavy chain (e.g., variable and constant domain) of this molecule, and “ADI-71663.LC” refers to the entire light chain (e.g., variable and constant domain) of the same molecule.

[0591] The invention further provides variable heavy and light domains as well as full length heavy and light chains.

[0592] In many embodiments, the antibodies of the invention are human (derived from phage) and block IL18-BP. As shown in FIGS. 1A-1D and 2A-2P, the anti-IL18-BP antibodies, with their components outlined as well:

[0593] CDR-H1, CDR-H2, CDR-H3, CDR-L1, CDR-L2, and CDR-L3 from 66650 lineage (VH1-03; VL-kappa-1-5);

[0594] CDR-H1, CDR-H2, CDR-H3, CDR-L1, CDR-L2, and CDR-L3 from 66670 lineage (VH1-69; VL-kappa-1-12);

[0595] CDR-H1, CDR-H2, CDR-H3, CDR-L1, CDR-L2, and CDR-L3 from 66692 lineage (VH3-23, VL-kappa-1-12);

[0596] CDR-H1, CDR-H2, CDR-H3, CDR-L1, CDR-L2, and CDR-L3 from 66716 lineage (VH1-39; VL-kappa-1-12);

[0597] ADI-71663, ADI-71663.VH, ADI-71663.VL, ADI-71663.HC, ADI-71663.LC and ADI-71663.H1, ADI-71663.H2, ADI-71663.H3, ADI-71663.H4; ADI-71663.vhCDR1, ADI-71663.vhCDR2, ADI-71663.vhCDR3, ADI-71663.vlCDR1, ADI-71663.vlCDR2, and ADI-71663.vlCDR3;

[0598] ADI-71662, ADI-71662.VH, ADI-71662.VL, ADI-71662.HC, ADI-71662.LC and ADI-71662.H1, ADI-71662.H2, ADI-71662.H3, ADI-71662.H4; ADI-71662.vhCDR1, ADI-71664. 71662, ADI-71662.vhCDR3, ADI-71662.vlCDR1, ADI-71662.vlCDR2, and ADI-71662.vlCDR3;

[0599] ADI-71701, ADI-71701.VH, ADI-71701.VL, ADI-71701.HC, ADI-71701.LC and ADI-71701.H1, ADI-71701.H2, ADI-71701.H3, ADI-71701.H4; ADI-71701.vhCDR1, ADI-71701.vhCDR2, ADI-71701.vhCDR3, ADI-71701.vlCDR1, ADI-71701.vlCDR2, and ADI-71701.vlCDR3;

[0600] ADI-71709, ADI-71709.VH, ADI-71709.VL, ADI-71709.HC, ADI-71709.LC and ADI-71709.H1, ADI-71709.H2, ADI-71709.H3, ADI-71709.H4; ADI-71709.vhCDR1, ADI-71709.vhCDR2, ADI-71709.vhCDR3, ADI-71709.vlCDR1, ADI-71709.vlCDR2, and ADI-71709.vlCDR3;

[0601] ADI-71710, ADI-71710.VH, ADI-71710.VL, ADI-71710.HC, ADI-71710.LC and ADI-71710.H1, ADI-71710.H2, ADI-71710.H3, ADI-71710.H4; ADI-71710.vhCDR1, ADI-71710.vhCDR2, ADI-71710.vhCDR3, ADI-71710.vlCDR1, ADI-71710.vlCDR2, and ADI-71710.vlCDR3;

[0602] ADI-71719, ADI-71719.VH, ADI-71719.VL, ADI-71719.HC, ADI-71719.LC and ADI-71719.H1, ADI-71719.H2, ADI-71719.H3, ADI-71719.H4; ADI-71719.vhCDR1, ADI-71719.vhCDR2, ADI-71719.vhCDR3, ADI-71719.vlCDR1, ADI-71719.vlCDR2, and ADI-71719.vlCDR3;

[0603] ADI-71720, ADI-71720.VH, ADI-71720.VL, ADI-71720.HC, ADI-71720.LC and ADI-71720.H1, ADI-71720.H2, ADI-71720.H3, ADI-71720.H4; ADI-71720.vhCDR1, ADI-71720.vhCDR2, ADI-71720.vhCDR3, ADI-71720.vlCDR1, ADI-71720.vlCDR2, and ADI-71720.vlCDR3;

[0604] ADI-71722, ADI-71722.VH, ADI-71722.VL, ADI-71722.HC, ADI-71722.LC and ADI-71722.H1, ADI71722.H2, ADI-71722.H3, ADI-71722.H4; ADI-71722.vhCDR1, ADI-71722.vhCDR2, ADI-71722.vhCDR3, ADI-71722.vlCDR1, ADI-71722.vlCDR2, and ADI-71722.vlCDR3;

[0605] ADI-71717, ADI-71717.VH, ADI-71717.VL, ADI-71717.HC, ADI-71717.LC and ADI-71717.H1, ADI71717.H2, ADI-71717.H3, ADI-71717.H4; ADI-71717.vhCDR1, ADI-71717.vhCDR2, ADI-71717.vhCDR3, ADI-71717.vlCDR1, ADI-71717.vlCDR2, and ADI-71717.vlCDR3;

[0606] ADI-71739, ADI-71739.VH, ADI-71739.VL, ADI-71739.HC, ADI-71739.LC and ADI-71739.H1, ADI71739.H2, ADI-71739.H3, ADI-71739.H4; ADI-71739.vhCDR1, ADI-71739.vhCDR2, ADI-71739.vhCDR3, ADI-71739.vlCDR1, ADI-71739.vlCDR2, and ADI-71739.vlCDR3;

[0607] ADI-71736, ADI-71736.VH, ADI-71736.VL, ADI-71736.HC, ADI-71736.LC and ADI-71736.H1, ADI71736.H2, ADI-71736.H3, ADI-71736.H4; ADI-71736.vhCDR1, ADI-71736.vhCDR2, ADI-71736.vhCDR3, ADI-71736.vlCDR1, ADI-71736.vlCDR2, and ADI-71736.vlCDR3;

[0608] ADI-71707, ADI-71707.VH, ADI-71707.VL, ADI-71707.HC, ADI-71707.LC and ADI-71707.H1, ADI-71707.H2, ADI-71707.H3, ADI-71707.H4; ADI-71707.vhCDR1, ADI-71707.vhCDR2, ADI-71707.vhCDR3, ADI-71707.vlCDR1, ADI-71707.vlCDR2, and ADI-71707.vlCDR3;

[0609] AB-837, AB-837.VH, AB-837.VL, AB-837.HC, AB-837.LC and AB-837.H1, AB-837.H2, AB-837.H3, AB-837.H4; AB-837.vhCDR1, AB-837.vhCDR2, AB-837.vhCDR3, AB-837.vlCDR1, AB-837.vlCDR2, and AB-837.vlCDR3;

[0610] ADI-66692, ADI-66692.VH, ADI-66692.VL, ADI-66692.HC, ADI-66692.LC and ADI-66692.H1, ADI-66692.H2, ADI-66692.H3, ADI-66692.H4; ADI-66692.vhCDR1, ADI-66692.vhCDR2, ADI-66692.vhCDR3, ADI-66692.vlCDR1, ADI-66692.vlCDR2, and ADI-66692.vlCDR3;

[0611] ADI-66716, ADI-66716.VH, ADI-66716.VL, ADI-66716.HC, ADI-66716.LC and ADI-66716.H1, ADI-66716.H2, ADI-66716.H3, ADI-66716.H4; ADI-66716.vhCDR1, ADI-66716.vhCDR2, ADI-66716.vhCDR3, ADI-66716.vlCDR1, ADI-66716.vlCDR2, and ADI-66716.vlCDR3;

[0612] ADI-71728, ADI-71728.VH, ADI-71728.VL, ADI-71728.HC, ADI-71728.LC and ADI-71728.H1, ADI-71728.H2, ADI-71728.H3, ADI-71728.H4; ADI-71728.vhCDR1, ADI-71728.vhCDR2, ADI-71728.vhCDR3, ADI-71728.vlCDR1, ADI-71728.vlCDR2, and ADI-71728.vlCDR3; or

[0613] ADI-71741, ADI-71741.VH, ADI-71741.VL, ADI-71741.HC, ADI-71741.LC and ADI-71741.H1, ADI71741.H2, ADI-71741.H3, ADI-71741.H4; ADI-71741.vhCDR1, ADI-71741.vhCDR2, ADI-71741.vhCDR3, ADI-71741.vlCDR1, ADI-71741.vlCDR2, and ADI-71741.vlCDR3;

[0614] ADI-71742, ADI-71742.VH, ADI-71742.VL, ADI-71742.HC, ADI-71742.LC and ADI-71742.H1, ADI71742.H2, ADI-71742.H3, ADI-71742.H4; ADI-71742.vhCDR1, ADI-71742.vhCDR2, ADI-71742.vhCDR3, ADI-71742.vlCDR1, ADI-71742.vlCDR2, and ADI-71742.vlCDR3;

[0615] ADI-71744, ADI-71744.VH, ADI-71744.VL, ADI-71744.HC, ADI-71744.LC and ADI-71744.H1, ADI71744.H2, ADI-71744.H3, ADI-71744.H4; ADI-71744.vhCDR1, ADI-71744.vhCDR2, ADI-71744.vhCDR3, ADI-71744.vlCDR1, ADI-71744.vlCDR2, and ADI-71744.vlCDR3;

[0616] ADI-71753, ADI-71753.VH, ADI-71753.VL, ADI-71753.HC, ADI-71753.LC and ADI-71753.H1, ADI71753.H2, ADI-71753.H3, ADI-71753.H4; ADI-71753.vhCDR1, ADI-71753.vhCDR2, ADI-71753.vhCDR3, ADI-71753.vlCDR1, ADI-71753.vlCDR2, and ADI-71753.vlCDR3; or

[0617] ADI71755, ADI-71755.VH, ADI-71755.VL, ADI-71755.HC, ADI-71755.LC and ADI-71755.H1, ADI71755.H2, ADI-71755.H3, ADI-71755.H4; ADI-71755.vhCDR1, ADI-71755.vhCDR2, ADI-71755.vhCDR3, ADI-71755.vlCDR1, ADI-71755.vlCDR2, and ADI-71755.vlCDR3.

C. IL18-BP Antibodies that Compete for Binding with Enumerated Antibodies

[0618] The present invention provides not only the enumerated antibodies but additional antibodies that compete with the enumerated antibodies (the VH and ADI numbers as enumerated herein that specifically bind to IL18-BP) to specifically bind to the IL18-BP molecule. The IL18-BP antibodies of the invention include antibodies that compete for binding with one or more of the enumerated antibodies, including VH1-03.66650, VH1-69.66670, VH3-23.66692, VH1-39.66716, VL-kappa-1-5-66650, VL-kappa-1-12, 66670, VL-kappa-1-12, 66692, VL-kappa-1-12, ADI-71663, ADI-71662, ADI-66692, ADI-71701, ADI-71709, ADI-71710, ADI-71707, ADI-71717, ADI-71719, ADI-71220, ADI-71722, ADI-71736, ADI-71739, ADI-71728, ADI-66716, ADI-71741, ADI-71742, ADI-71744, ADI-71753, or ADI-71755.

### D. Generation of Additional Antibodies

[0619] Additional antibodies to human IL18-BP can be done as is well known in the art, using well known methods such as those outlined in the examples. Thus, additional anti-IL18-BP antibodies can be generated by traditional methods such as immunizing mice (sometimes using DNA immunization, for example, such as is used by Aldevron), followed by screening against IL18-BP (including human IL18-BP) protein and hybridoma generation, with antibody purification and recovery.

### E. Optional Antibody Engineering

[0620] The anti-IL18-BP antibodies (e.g., anti-IL18-BP antibodies including those with CDRs identical to those shown in FIGS. 1, 2, and/or 3) of the invention can be modified, or engineered, to alter the amino acid sequences by amino acid substitutions.

[0621] By “amino acid substitution” or “substitution” herein is meant the replacement of an amino acid at a particular position in a parent polypeptide sequence with a different amino acid. In particular, in some embodiments, the substitution is to an amino acid that is not naturally occurring at the particular position, either not naturally occurring within the organism or in any organism. For example, the substitution E272Y refers to a variant polypeptide, in this case an Fc variant, in which the glutamic acid at position 272 is replaced with tyrosine. For clarity, a protein which has been engineered to change the nucleic acid coding sequence but not change the starting amino acid (for example exchanging CGG (encoding arginine) to CGA (still encoding arginine) to increase host organism expression levels) is not an “amino acid substitution”; that is, despite the creation of a new gene encoding the same protein, if the protein has the same amino acid at the particular position that it started with, it is not an amino acid substitution.

[0622] As discussed herein, amino acid substitutions can be made to alter the affinity of the CDRs for the IL18-BP protein (including both increasing and decreasing binding, as is more fully outlined below), as well as to alter additional functional properties of the antibodies. For example, the antibodies may be engineered to include modifications within the Fc region, typically to alter one or more functional properties of the antibody, such as serum half-life, complement fixation, Fc receptor binding, and/or antigen-dependent cellular cytotoxicity. Furthermore, an antibody according to at least some embodiments of the invention may be chemically modified (e.g., one or more chemical moieties can be attached to the antibody) or be modified to alter its glycosylation, again to alter one or more functional properties of the antibody. Such embodiments are described further below. The numbering of residues in the Fc region is that of the EU index of Kabat.

[0623] In some embodiments, the hinge region of CH1 is modified such that the number of cysteine residues in the hinge region is altered, e.g., increased or decreased. This approach is described further in U.S. Pat. No. 5,677,425 by Bodmer et al. The number of cysteine residues in the hinge region of CH1 is altered to, for example, facilitate assembly of the light and heavy chains or to increase or decrease the stability of the antibody.

[0624] In another embodiment, the Fc hinge region of an antibody is mutated to decrease the biological half-life of the antibody. More specifically, one or more amino acid mutations are introduced into the CH2-CH3 domain interface region of the Fc-hinge fragment such that the antibody has impaired Staphylococcyl protein A (SpA) binding relative to native Fc-hinge domain SpA binding. This approach is described in further detail in U.S. Pat. No. 6,165,745 by Ward et al.

[0625] In some embodiments, amino acid substitutions can be made in the Fc region, in general for altering binding to FcγR receptors. By “Fc gamma receptor”, “FcγR” or “FcgammaR” as used herein is meant any member of the family of proteins that bind the IgG antibody Fc region and is encoded by an FcγR gene. In humans this family includes but is not limited to FcγRI (CD64), including isoforms FcγRIa, FcγRIb, and FcγRIc; FcγRII (CD32), including isoforms FcγRIIa (including allotypes H131 and R131), FcγRIIb (including FcγRIIb-1 and FcγRIIb-2), and FcγRIIc; and FcγRIII (CD16), including isoforms FcγRIIIa (including allotypes V158 and F158) and FcγRIIIb (including allotypes FcγRIIIb-NA1 and FcγRIIIb-NA2) (Jefferis et al., 2002, Immunol Lett 82:57-65, entirely incorporated by reference), as well as any undiscovered human FcγRs or FcγR isoforms or allotypes. An FcγR may be from any organism, including but not limited to humans, mice, rats, rabbits, and monkeys. Mouse FcγRs include but are not limited to FcγRI (CD64), FcγRII (CD32), FcγRIII-1 (CD16), and FcγRIII-2 (CD16-2), as well as any undiscovered mouse FcγRs or FcγR isoforms or allotypes.

[0626] There are a number of useful Fc substitutions that can be made to alter binding to one or more of the FcγR receptors. Substitutions that result in increased binding as well as decreased binding can be useful. For example, it is known that increased binding to FcγRIIIa generally results in increased ADCC (antibody dependent cell-mediated cytotoxicity; the cell-mediated reaction wherein nonspecific cytotoxic cells that express FcγRs recognize bound antibody on a target cell and subsequently cause lysis of the target cell. Similarly, decreased binding to FcγRIIb (an inhibitory receptor) can be beneficial as well in some circumstances. Amino acid substitutions that find use in the present invention include those listed in U.S. Ser. Nos. 11/124,620 (particularly FIG. 41) and U.S. Pat. No. 6,737,056, both of which are expressly incorporated herein by reference in their entirety and specifically for the variants disclosed therein. Particular variants that find use include, but are not limited to, 236A, 239D, 239E, 332E, 332D, 239D/332E, 267D, 267E, 328F, 267E/328F, 236A/332E, 239D/332E/330Y, 239D, 332E/330L, 299T and 297N.

[0627] In addition, the antibodies of the invention are modified to increase its biological half-life. Various approaches are possible. For example, one or more of the following mutations can be introduced: T252L, T254S, T256F, as described in U.S. Pat. No. 6,277,375 to Ward. Alternatively, to increase the biological half-life, the antibody can be altered within the C_{H}1 or C_{L} region to contain a salvage receptor binding epitope taken from two loops of a CH2 domain of an Fc region of an IgG, as described in U.S. Pat. Nos. 5,869,046 and 6,121,022 by Presta et al. Additional mutations to increase serum half-life are disclosed in U.S. Pat. Nos. 8,883,973, 6,737,056 and 7,371,826, and include 428L, 434A, 434S, and 428L/434S.

[0628] In yet other embodiments, the Fc region is altered by replacing at least one amino acid residue with a different amino acid residue to alter the effector functions of the antibody. For example, one or more amino acids selected from amino acid residues 234, 235, 236, 237, 297, 318, 320 and 322 can be replaced with a different amino acid residue such that the antibody has an altered affinity for an effector ligand but retains the antigen-binding ability of the parent antibody. The effector ligand to which affinity is altered can be, for example, an Fc receptor or the C1 component of complement. This approach is described in further detail in U.S. Pat. Nos. 5,624,821 and 5,648,260, both by Winter et al.

[0629] In another example, one or more amino acids selected from amino acid residues 329, 331 and 322 can be replaced with a different amino acid residue such that the antibody has altered C1q binding and/or reduced or abolished complement dependent cytotoxicity (CDC). This approach is described in further detail in U.S. Pat. No. 6,194,551 by Idusogie et al.

[0630] In another example, one or more amino acid residues within amino acid positions 231 and 239 are altered to thereby alter the ability of the antibody to fix complement. This approach is described further in PCT Publication WO 94/29351 by Bodmer et al.

[0631] In yet another example, the Fc region is modified to increase the ability of the antibody to mediate antibody dependent cellular cytotoxicity (ADCC) and/or to increase the affinity of the antibody for an Fcγ receptor by modifying one or more amino acids at the following positions: 238, 239, 248, 249, 252, 254, 255, 256, 258, 265, 267, 268, 269, 270, 272, 276, 278, 280, 283, 285, 286, 289, 290, 292, 293, 294, 295, 296, 298, 301, 303, 305, 307, 309, 312, 315, 320, 322, 324, 326, 327, 329, 330, 331, 333, 334, 335, 337, 338, 340, 360, 373, 376, 378, 382, 388, 389, 398, 414, 416, 419, 430, 434, 435, 437, 438 or 439. This approach is described further in PCT Publication WO 00/42072 by Presta. Moreover, the binding sites on human IgG1 for FcγRI, FcγRII, FcγRIII and FcRn have been mapped and variants with improved binding have been described (see Shields, R. L. et al., J. Biol. Chem., 276:6591-6604 (2001)). Specific mutations at positions 256, 290, 298, 333, 334 and 339 are shown to improve binding to FcγRIII. Additionally, the following combination mutants are shown to improve FcγRIII binding: T256A/S298A, S298A/E333A, S298A/K224A and S298A/E333A/K334A. Furthermore, mutations such as M252Y/S254T/T256E or M428L/N434S improve binding to FcRn and increase antibody circulation half-life (see Chan C A and Carter P J (2010) Nature Rev Immunol 10:301-316).

[0632] In still another embodiment, the antibody can be modified to abrogate in vivo Fab arm exchange. Specifically, this process involves the exchange of IgG4 half-molecules (one heavy chain plus one light chain) between other IgG4 antibodies that effectively results in bispecific antibodies which are functionally monovalent. Mutations to the hinge region and constant domains of the heavy chain can abrogate this exchange (see, Aalberse, RC, Schuurman J., Immunology, 105:9-19 (2002)).

[0633] In still another embodiment, the glycosylation of an antibody is modified. For example, an aglycosylated antibody can be made (i.e., the antibody lacks glycosylation). Glycosylation can be altered to, for example, increase the affinity of the antibody for antigen or reduce effector function such as ADCC. Such carbohydrate modifications can be accomplished by, for example, altering one or more sites of glycosylation within the antibody sequence, for example N297. For example, one or more amino acid substitutions can be made that result in elimination of one or more variable region framework glycosylation sites to thereby eliminate glycosylation at that site.

[0634] Additionally or alternatively, an antibody can be made that has an altered type of glycosylation, such as a hypofucosylated antibody having reduced amounts of fucosyl residues or an antibody having increased bisecting GlcNac structures. Such altered glycosylation patterns have been demonstrated to increase the ADCC ability of antibodies. Such carbohydrate modifications can be accomplished by, for example, expressing the antibody in a host cell with altered glycosylation machinery. Cells with altered glycosylation machinery have been described in the art and can be used as host cells in which to express recombinant antibodies according to at least some embodiments of the invention to thereby produce an antibody with altered glycosylation. For example, the cell lines Ms704, Ms705, and Ms709 lack the fucosyltransferase gene, FUT8 (a (1,6) fucosyltransferase), such that antibodies expressed in the Ms704, Ms705, and Ms709 cell lines lack fucose on their carbohydrates. The Ms704, Ms705, and Ms709 FUT8 cell lines are created by the targeted disruption of the FUT8 gene in CHO/DG44 cells using two replacement vectors (see U.S. Patent Publication No. 20040110704 by Yamane et al. and Yamane-Ohnuki et al., Biotechnol Bioeng 87:614-22 (2004)). As another example, EP 1,176,195 by Hanai et al. describes a cell line with a functionally disrupted FUT8 gene, which encodes a fucosyl transferase, such that antibodies expressed in such a cell line exhibit hypofucosylation by reducing or eliminating the a 1,6 bond-related enzyme. Hanai et al. also describe cell lines which have a low enzyme activity for adding fucose to the N-acetylglucosamine that binds to the Fc region of the antibody or does not have the enzyme activity, for example the rat myeloma cell line YB2/0 (ATCC CRL 1662). PCT Publication WO 03/035835 by Presta describes a variant CHO cell line, Lec13 cells, with reduced ability to attach fucose to Asn(297)-linked carbohydrates, also resulting in hypofucosylation of antibodies expressed in that host cell (see also Shields, R. L. et al., J. Biol. Chem., 277:26733-26740 (2002)). PCT Publication WO 99/54342 by Umana et al. describes cell lines engineered to express glycoprotein-modifying glycosyl transferases (e.g., β(1,4)-N-acetylglucosaminyltransferase III (GnTIII)) such that antibodies expressed in the engineered cell lines exhibit increased bisecting GlcNac structures which results in increased ADCC activity of the antibodies (see also Umana et al., Nat. Biotech., 17:176-180 (1999)). Alternatively, the fucose residues of the antibody may be cleaved off using a fucosidase enzyme. For example, the fucosidase a-L-fucosidase removes fucosyl residues from antibodies (Tarentino, A. L. et al., Biochem., 14:5516-23 (1975)).

[0635] Another modification of the antibodies herein that is contemplated by the invention is pegylation or the addition of other water-soluble moieties, typically polymers, e.g., in order to enhance half-life. An antibody can be pegylated to, for example, increase the biological (e.g., serum) half-life of the antibody. To pegylate an antibody, the antibody, or fragment thereof, typically is reacted with polyethylene glycol (PEG), such as a reactive ester or aldehyde derivative of PEG, under conditions in which one or more PEG groups become attached to the antibody or antibody fragment. Preferably, the pegylation is carried out via an acylation reaction or an alkylation reaction with a reactive PEG molecule (or an analogous reactive water-soluble polymer). As used herein, the term “polyethylene glycol” is intended to encompass any of the forms of PEG that have been used to derivatize other proteins, such as mono (C1-C10) alkoxy- or aryloxy-polyethylene glycol or polyethylene glycol-maleimide. In certain embodiments, the antibody to be pegylated is an aglycosylated antibody. Methods for pegylating proteins are known in the art and can be applied to the antibodies according to at least some embodiments of the invention. See for example, EP 0 154 316 by Nishimura et al. and EP 0 401 384 by Ishikawa et al.

[0636] In addition to substitutions made to alter binding affinity to FcγRs and/or FcRn and/or increase in vivo serum half-life, additional antibody modifications can be made, as described in further detail below.

[0637] In some cases, affinity maturation is done. Amino acid modifications in the CDRs are sometimes referred to as “affinity maturation”. An “affinity matured” antibody is one having one or more alteration(s) in one or more CDRs which results in an improvement in the affinity of the antibody for antigen, compared to a parent antibody which does not possess those alteration(s). In some cases, although rare, it may be desirable to decrease the affinity of an antibody to its antigen, but this is generally not preferred.

[0638] In some embodiments, one or more amino acid modifications are made in one or more of the CDRs of the IL18-BP antibodies of the invention. In general, only 1 or 2 or 3-amino acids are substituted in any single CDR, and generally no more than from 1, 2, 3, 4, 5, 6, 7, 8 9 or 10 changes are made within a set of CDRs. However, it should be appreciated that any combination of no substitutions, 1, 2 or 3 substitutions in any CDR can be independently and optionally combined with any other substitution.

[0639] Affinity maturation can be done to increase the binding affinity of the antibody for the IL18-BP antigen by at least about 100% or more, or at least about 10⁴ or more, 10⁵ or more, 10⁶ or more, 10⁷ or more, as compared to the “parent” antibody. Preferred affinity matured antibodies will have nanomolar or even picomolar affinities for the IL18-BP antigen. Affinity matured antibodies are produced by known procedures. See, for example, Marks et al., 1992, Biotechnology 10:779-783 that describes affinity maturation by variable heavy chain (VH) and variable light chain (VL) domain shuffling. Random mutagenesis of CDR and/or framework residues is described in: Barbas, et al., PNAS, USA 91:3809-3813 (1994); Shier et al., Gene, 169:147-155 (1995); Yelton et al., J. Immunol., 155:1994-2004 (1995); Jackson et al., J. Immunol., 154(7):3310-9 (1995); and Hawkins et al., J. Mol. Biol., 226:889-896 (1992), for example.

[0640] Alternatively, amino acid modifications can be made in one or more of the CDRs of the antibodies of the invention that are “silent”, e.g., that do not significantly alter the affinity of the antibody for the antigen. These can be made for a number of reasons, including optimizing expression (as can be done for the nucleic acids encoding the antibodies of the invention).

[0641] Thus, included within the definition of the CDRs and antibodies of the invention are variant CDRs and antibodies; that is, the antibodies of the invention can include amino acid modifications in one or more of the CDRs of the enumerated antibodies of the invention. In addition, as outlined below, amino acid modifications can also independently and optionally be made in any region outside the CDRs, including framework and constant regions.

### F. IL-18BP Epitope Mapping

[0642] The anti-IL-18BP antibodies described herein bind at least one epitope on the IL-18BP. Such epitopes can be conformational or linear. As described above, a conformational epitope is produced by spatially juxtaposed amino acids from different segments of the linear polypeptide chain. A linear epitope is one produced by adjacent amino acid residues in a polypeptide chain.

[0643] In some embodiments, the anti-IL-18BP antibodies described herein bind at least one conformational epitope that includes one or more amino acid residues of region 1 (SEQ ID NO: 1917). Region 1 includes the amino acid sequence of SRFPNFSIL (SEQ ID NO: 1917). In some embodiments, the anti-IL-18BP antibodies bind one or more amino acid residues of SEQ ID NO: 1917. For example, the anti-IL-18BP antibodies can bind one, two, three, four, five, six, seven, eight, or all nine of the amino acid residues of SEQ ID NO: 1917. Specifically, the anti-IL-18BP antibodies can bind amino acid residue S1, R2, F3, P4, N5, F6, S7, I8, or L9, or any combination thereof, of SEQ ID NO: 1917. In some embodiments, the anti-IL-18BP antibodies bind amino acid residue S7, I8, or L9, or any combination thereof, of SEQ ID NO: 1917. In some embodiments, the anti-IL-18BP antibodies bind amino acid residues S7, I8, and L9 of SEQ ID NO: 1917.

[0644] In some embodiments, the anti-IL-18BP antibodies described herein bind at least one conformational epitope that includes one or more amino acid residues of region 6 (SEQ ID NO: 1919). Region 6 comprises the amino acid sequence of VDPEQVVQRH (SEQ ID NO: 1919). In some embodiments, the anti-IL-18BP antibodies bind one or more amino acid residues of SEQ ID NO: 1919. For example, the anti-IL-18BP antibodies can bind one, two, three, four, five, six, seven, eight, or nine of the amino acid residues of SEQ ID NO: 1919. Specifically, the anti-IL-18BP antibodies can bind amino acid residue V1, D2, P3, E4, Q5, V6, V7, Q8, or R9, or any combination thereof, of SEQ ID NO: 1919. In some embodiments, the anti-IL-18BP antibodies bind amino acid residue D2, P3, E4, Q5, V6, V7, Q8, or R9, or any combination thereof, of SEQ ID NO: 1919. In some embodiments, the anti-IL-18BP antibodies bind amino acid residues D2, P3, E4, Q5, V6, V7, Q8, and R9 of SEQ ID NO: 1919.

[0645] In some embodiments, the anti-IL-18BP antibodies described herein bind at least one conformational epitope that includes a first amino acid including one or more of amino acid residues of region 1, and a second amino acid including one or more of amino acid residues of region 6. In some embodiments, the anti-IL-18BP antibodies bind one or more amino acid residues of SEQ ID NO: 1917, and one or more amino acid residues of SEQ ID NO: 1919. For example, the anti-IL-18BP antibodies can bind one, two, three, four, five, six, seven, eight, or all nine of the amino acid residues of SEQ ID NO: 1917, and one, two, three, four, five, six, seven, eight, or nine of the amino acid residues of SEQ ID NO: 1919. Specifically, the anti-IL-18BP antibodies can bind amino acid residue S1, R2, F3, P4, N5, F6, S7, I8, or L9, or any combination thereof, of SEQ ID NO: 1917; and amino acid residue V1, D2, P3, E4, Q5, V6, V7, Q8, or R9, or any combination thereof, of SEQ ID NO: 1919. In some particular embodiments, the anti-IL-18BP antibodies bind amino acid residue S7, I8, or L9, or any combination thereof, of SEQ ID NO: 1917, and amino acid residue D2, P3, E4, Q5, V6, V7, Q8, or R9, or any combination thereof, of SEQ ID NO: 1919. In some embodiments, the anti-IL-18BP antibodies bind amino acid residues S7, I8, and L9 of SEQ ID NO: 1917, and amino acid residues D2, P3, E4, Q5, V6, V7, Q8, and R9 of SEQ ID NO: 1919.

[0646] The conformational or linear epitopes, or binding sites of the IL-18BP antibodies described herein, can be identified using methods known in the art. Non-limiting examples of such methods for identifying conformational epitopes include Hydrogen deuterium exchange-mass spectrometry (HDX-MS), electron microscopy (cryo-/negative stain), and deep mutational scanning (Francino-Urdaniz et al., RSC Chem Biol., 2(6):1580-1589 (2021); Renaud et al., Nat Rev Drug Discov, 17(7):471-492 (2018); Malito et al., Int. J. Mol. Sci., 16(6):13106-13140 (2015); Sun et al., Anal. Bioanal. Chem., 413(9):2345-2359 (2021)). HDX-MS is used to obtain structural data of proteins and their binding partners to identify the interaction interface and observe the dynamics of the protein over time. With advancing protein digestion techniques, implementation of different fragmentation methods and data analysis software, high-throughput HDX-MS is capable of routinely obtaining single amino acid resolution data. A summary of HDX-MS and the use thereof in the study of molecular interactions can be found at Vinciauskaite et al., Essays Biochem., 67(2): 301-314; (2023).

[0647] Commonly known mapping methods for identifying linear epitopes include peptide arrays and phage and bacterial display (Katz et al., Chem. Soc. Rev., 40(5):2131-2145 (2011); Pande et al., Biotechnol Adv., 28(6):849-58 (2010)).

[0648] It is known in the art that there are four IL18-BP isoforms denoted IL18-BP isoforms a, b, c and d. IL18-BP isoforms a and c both contain certain conformational epitopes described herein. For example, IL18-BP isoforms a and c both contain the conformational epitope that includes a first amino acid sequence having one or more amino acid residues of SEQ ID NO: 1917, and/or a second amino acid sequence having one or more amino acid residues of SEQ ID NO: 1919. In some embodiments, both the full length IL18-BP isoforms a and c that contain the N terminal signaling peptide, and the secreted the IL18-BP isoforms a and c that do not contain the N terminal signaling peptide, contain the conformational epitope described herein, e.g., the aforementioned conformational epitope defined by certain amino acid residues of SEQ ID NO: 1917 and/or certain amino acid residues of SEQ ID NO: 1919.

[0649] IL18-BP isoforms b and d do not contain both the amino acid residues of SEQ ID NO: 1917 and SEQ ID NO: 1919. Specifically, IL18-BP isoform d contains the amino acid residues of SEQ ID NO: 1917, but does not contain the amino acid residues of SEQ ID NO: 1919. IL18-BP isoform d does not contain the amino acid residues of SEQ ID NO: 1917 or SEQ ID NO: 1919. Accordingly, neither IL18-BP isoform b nor IL18-BP isoform d contain the conformational epitope that includes a first amino acid sequence having one or more amino acid residues of SEQ ID NO: 1917, and a second amino acid sequence having one or more amino acid residues of SEQ ID NO: 1919. In some embodiments, both the full length IL18-BP isoforms b and d that contain the N terminal signaling peptide, and the secreted the IL18-BP isoforms b and d that do not contain the N terminal signaling peptide, contain the conformational epitope described herein, e.g., the aforementioned conformational epitope defined by certain amino acid residues of SEQ ID NO: 1917 and/or certain amino acid residues of SEQ ID NO: 1919.

[0650] In some embodiments, the anti-IL18-BP antibody described herein binds IL18-BP isoform a, including full length or secreted isoform a. In some embodiments, the anti-IL18-BP antibody binds IL18-BP isoform c, including full length or secreted isoform c. In some embodiments, the anti-IL18-BP antibody binds both IL18-BP isoform a and isoform c. In some embodiments, the anti-IL18-BP antibody does not bind IL18-BP isoform b, including full length or secreted isoform b. In some embodiments, the anti-IL18-BP antibody does not bind IL18-BP isoform d, including length or secreted isoform d. In some embodiments, the anti-IL18-BP antibody does not bind neither IL18-BP isoform b nor isoform d.

[0651] In some embodiments, the anti-IL18-BP antibody binds IL18-BP isoform a and/or isoform c, but not IL18-BP isoform b and/or isoform d. In some embodiments, the anti-IL18-BP antibody binds IL18-BP isoform a but not isoform b. In some embodiments, the anti-IL18-BP antibody binds IL18-BP isoform c, but not isoform b. In some embodiments, the anti-IL18-BP antibody binds both IL18-BP isoform a and isoform c, but not isoform b. In some embodiments, the anti-IL18-BP antibody binds IL18-BP isoform a but not isoform d. In some embodiments, the anti-IL18-BP antibody binds IL18-BP isoform c, but not isoform d. In some embodiments, the anti-IL18-BP antibody binds both IL18-BP isoform a and isoform c, but not isoform d. In some embodiments, the anti-IL18-BP antibody binds IL18-BP isoform a, but not isoform b nor isoform d. In some embodiments, the anti-IL18-BP antibody binds IL18-BP isoform c, but not isoform b nor isoform d. In some embodiments, the anti-IL18-BP antibody binds both IL18-BP isoform a and isoform c, but not isoform b nor isoform d.

### III. Nucleic Acid Compositions

[0652] Nucleic acid compositions encoding the anti-IL18-BP antibodies of the invention are also provided, as well as expression vectors containing the nucleic acids and host cells transformed with the nucleic acid and/or expression vector compositions. As will be appreciated by those in the art, the protein sequences depicted herein can be encoded by any number of possible nucleic acid sequences, due to the degeneracy of the genetic code.

[0653] The nucleic acid compositions that encode the IL18-BP antibodies will depend on the format of the antibody. For traditional, tetrameric antibodies containing two heavy chains and two light chains are encoded by two different nucleic acids, one encoding the heavy chain and one encoding the light chain. These can be put into a single expression vector or two expression vectors, as is known in the art, transformed into host cells, where they are expressed to form the antibodies of the invention. In some embodiments, for example when scFv constructs are used, a single nucleic acid encoding the variable heavy chain-linker-variable light chain is generally used, which can be inserted into an expression vector for transformation into host cells. The nucleic acids can be put into expression vectors that contain the appropriate transcriptional and translational control sequences, including, but not limited to, signal and secretion sequences, regulatory sequences, promoters, origins of replication, selection genes, etc.

[0654] Preferred mammalian host cells for expressing the recombinant antibodies according to at least some embodiments of the invention include Chinese Hamster Ovary (CHO cells), PER.C6, HEK293 and others as is known in the art.

[0655] The nucleic acids may be present in whole cells, in a cell lysate, or in a partially purified or substantially pure form. A nucleic acid is “isolated” or “rendered substantially pure” when purified away from other cellular components or other contaminants, e.g., other cellular nucleic acids or proteins, by standard techniques, including alkaline/SDS treatment, CsCl banding, column chromatography, agarose gel electrophoresis and others well known in the art.

[0656] To create a scFv gene, the VH- and VL-encoding DNA fragments are operatively linked to another fragment encoding a flexible linker, e.g., encoding the amino acid sequence (Gly4-Ser)3 (SEQ ID NO: 150), such that the VH and VL sequences can be expressed as a contiguous single-chain protein, with the VL and VH regions joined by the flexible linker (see, e.g., Bird et al., Science, 242:423-426 (1988); Huston et al., PNAS, 85:5879-5883 (1988); McCafferty et al., Nature, 348:552-554 (1990)).

### IV. Administration of Formulations of Anti-IL18-BP Antibodies

[0657] Administration of the pharmaceutical composition comprising anti-IL18-BP antibodies of the present invention (e.g., anti-IL18-BP antibodies including those with CDRs identical to those shown in FIGS. 1, 2, and/or 3), preferably in the form of a sterile aqueous solution, may be done in a variety of ways, As is known in the art, protein therapeutics are often delivered by IV infusion. The antibodies of the present invention may also be delivered using such methods. For example, administration may be veinous or by intravenous infusion with 0.9% sodium chloride as an infusion vehicle. Such techniques are disclosed in Remington's Pharmaceutical Sciences 16th edition, Osol, A. Ed., 1980.

[0658] The dosing amounts and frequencies of administration are, in some embodiments, selected to be therapeutically or prophylactically effective. As is known in the art, adjustments for protein degradation, systemic versus localized delivery, and rate of new protease synthesis, as well as the age, body weight, general health, sex, diet, time of administration, drug interaction and the severity of the condition may be necessary, and will be ascertainable with routine experimentation by those skilled in the art. In order to treat a patient, a therapeutically effective dose of the Fc variant of the present invention may be administered. By “therapeutically effective dose” herein is meant a dose that produces the effects for which it is administered.

### V. Administration of Formulations of Anti-IL18-BP Antibodies

[0659] Administration of the pharmaceutical composition comprising anti-IL18-BP antibodies of the present invention (e.g., anti-IL18-BP antibodies including those described in FIGS. 1, 2, and/or 3), preferably in the form of a sterile aqueous solution, may be done in a variety of ways, As is known in the art, protein therapeutics are often delivered by IV infusion. The antibodies of the present invention may also be delivered using such methods. For example, administration may venous or by intravenous infusion with 0.9% sodium chloride as an infusion vehicle. Such techniques are disclosed in Remington's Pharmaceutical Sciences 16th edition, Osol, A. Ed., 1980.

[0660] The dosing amounts and frequencies of administration are, in some embodiments, selected to be therapeutically or prophylactically effective. As is known in the art, adjustments for protein degradation, systemic versus localized delivery, and rate of new protease synthesis, as well as the age, body weight, general health, sex, diet, time of administration, drug interaction and the severity of the condition may be necessary, and will be ascertainable with routine experimentation by those skilled in the art. In order to treat a patient, a therapeutically effective dose of the Fc variant of the present invention may be administered. By “therapeutically effective dose” herein is meant a dose that produces the effects for which it is administered.

### VI. Methods of Using the Anti-IL18-BP Antibody

[0661] A. Therapeutic Uses

[0662] The anti-IL18-BP antibodies (e.g., anti-IL18-BP antibodies including those described in FIGS. 1, 2, and/or 3) find use in treating patients, such as human subjects, generally with a condition associated with IL18-BP or free IL18 levels. The term “treatment” as used herein, refers to both therapeutic treatment and prophylactic or preventative measures, which in this example relates to treatment of cancer. Those in need of treatment include those already with cancer as well as those in which the cancer is to be prevented. Hence, the mammal to be treated herein may have been diagnosed as having the cancer or may be predisposed or susceptible to the cancer. As used herein the term “treating” refers to preventing, delaying the onset of, curing, reversing, attenuating, alleviating, minimizing, suppressing, halting the deleterious effects or stabilizing of discernible symptoms of the above-described cancerous diseases, disorders or conditions. It also includes managing the cancer as described above. By “manage” it is meant reducing the severity of the disease, reducing the frequency of episodes of the disease, reducing the duration of such episodes, reducing the severity of such episodes, slowing/reducing cancer cell growth or proliferation, slowing progression of at least one symptom, amelioration of at least one measurable physical parameter and the like. For example, immunostimulatory anti-IL18-BP immune molecules should promote T cells, NK cells, NKT cells, Myeloid cells, Dendritic cells, MAIT T cells, 76 T cells, and/or innate lymphoid cells (ILCs), or cytokine immunity against target cells, e.g., cancer, infected or pathogen cells and thereby treat cancer or infectious diseases by depleting the cells involved in the disease condition.

[0663] The IL18-BP antibodies of the invention are provided in therapeutically effective dosages. A “therapeutically effective dosage” of an anti-IL18-BP immune molecule according to at least some embodiments of the present invention preferably results in a decrease in severity of disease symptoms, an increase in frequency and duration of disease symptom-free periods, an increase in lifespan, disease remission, or a prevention or reduction of impairment or disability due to the disease affliction. For example, for the treatment of IL18-BP positive tumors, a “therapeutically effective dosage” preferably inhibits cell growth or tumor growth by at least about 20%, more preferably by at least about 40%, even more preferably by at least about 60%, and still more preferably by at least about 80% relative to untreated subjects. The ability of a compound to inhibit tumor growth can be evaluated in an animal model system predictive of efficacy in human tumors. Alternatively, this property of a composition can be evaluated by examining the ability of the compound to inhibit, such inhibition in vitro by assays known to the skilled practitioner. A therapeutically effective amount of a therapeutic compound can decrease tumor size, or otherwise ameliorate symptoms in a subject.

[0664] One of ordinary skill in the art would be able to determine a therapeutically effective amount based on such factors as the subject's size, the severity of the subject's symptoms, and the particular composition or route of administration selected.

### 1. Cancer Treatment

[0665] The IL18-BP antibodies of the invention, alone or in combination with other therapeutic agents, find particular use in the treatment of cancer. In general, the antibodies of the invention are immunomodulatory, in that rather than directly attack cancerous cells, the anti-IL18-BP antibodies of the invention stimulate the immune system, generally by inhibiting the action of IL18-BP. Thus, unlike tumor-targeted therapies, which are aimed at inhibiting molecular pathways that are crucial for tumor growth and development, and/or depleting tumor cells, cancer immunotherapy is aimed to stimulate the patient's own immune system to eliminate cancer cells, providing long-lived tumor destruction. Various approaches can be used in cancer immunotherapy, among them are therapeutic cancer vaccines to induce tumor-specific T cell responses, and immunostimulatory antibodies (i.e., antagonists of inhibitory receptors=immune checkpoints) to remove immunosuppressive pathways.

[0666] Clinical responses with targeted therapy or conventional anti-cancer therapies tend to be transient as cancer cells develop resistance, and tumor recurrence takes place. However, the clinical use of cancer immunotherapy in the past few years has shown that this type of therapy can have durable clinical responses, showing dramatic impact on long term survival. However, although responses are long term, only a small number of patients respond (as opposed to conventional or targeted therapy, where a large number of patients respond, but responses are transient).

[0667] By the time a tumor is detected clinically, it has already evaded the immune-defense system by acquiring immunoresistant and immunosuppressive properties and creating an immunosuppressive tumor microenvironment through various mechanisms and a variety of immune cells.

[0668] Accordingly, the anti-IL18-BP antibodies of the invention are useful in treating cancer. Due to the nature of an immuno-oncology mechanism of action, IL18-BP does not necessarily need to be overexpressed on or correlated with a particular cancer type; that is, the goal is to have the anti-IL18-BP antibodies de-suppress T cells, NK cells, NKT cells, Myeloid cells, Dendritic cells, MAIT T cells, γδ T cells, and/or innate lymphoid cells (ILCs)activation, such that the immune system will go after the cancers.

[0669] “Cancer,” as used herein, refers broadly to any neoplastic disease (whether invasive or metastatic) characterized by abnormal and uncontrolled cell division causing malignant growth or tumor (e.g., unregulated cell growth). The term “cancer” or “cancerous” as used herein should be understood to encompass any neoplastic disease (whether invasive, non-invasive or metastatic) which is characterized by abnormal and uncontrolled cell division causing malignant growth or tumor, non-limiting examples of which are described herein. This includes any physiological condition in mammals that is typically characterized by unregulated cell growth.

[0670] “Cancer therapy” herein refers to any method that prevents or treats cancer or ameliorates one or more of the symptoms of cancer. Typically, such therapies will comprise administration of immunostimulatory anti-IL18-BP antibodies (including antigen-binding fragments) either alone or in combination with chemotherapy or radiotherapy or other biologics and for enhancing the activity thereof, i.e., in individuals wherein expression of IL18-BP suppresses antitumor responses and the efficacy of chemotherapy or radiotherapy or biologic efficacy.

[0671] The anti-IL18-BP antibodies of the present invention, as a monotherapy or as part of a combination therapy as described herein, can be used in the treatment of solid tumors (including, for example, cancers of the lung, liver, breast, brain, GI tract) and blood cancers (including for example, leukemia and preleukemic disorders, lymphoma, plasma cell disorders) carcinoma, lymphoma, blastoma, sarcoma, and leukemia or lymphoid malignancies. In some embodiments, the cancer is early. In some embodiments, the cancer is advanced (including metastatic). In some embodiments, the cancers amenable for treatment of the invention include cancers that express IL18-BP and further include non-metastatic or non-invasive, as well as invasive or metastatic cancers, including cancers where IL18-BP expression by immune, stromal, or diseased cells suppresses antitumor responses and anti-invasive immune responses. In some embodiments, the anti-IL18-BP antibodies can be used for the treatment of vascularized tumors. In some embodiments, the cancer for treatment using the anti-IL18-BP antibodies of the present invention includes carcinoma, lymphoma, sarcoma, and/or leukemia. In some embodiments, the cancer for treatment using the anti-IL18-BP antibodies of the present invention includes vascularized tumors, melanoma, non-melanoma skin cancer (squamous and basal cell carcinoma), mesothelioma, squamous cell cancer, lung cancer, small-cell lung cancer, non-small cell lung cancer, neuroendocrine lung cancer (including pleural mesothelioma, neuroendocrine lung carcinoma), NSCL (large cell), NSCLC large cell adenocarcinoma, non-small cell lung carcinoma (NSCLC), NSCLC squamous cell, soft-tissue sarcoma, Kaposi's sarcoma, adenocarcinoma of the lung, squamous carcinoma of the lung, NSCLC with PDL1>=50% TPS, neuroendocrine lung carcinoma, atypical carcinoid lung cancer, cancer of the peritoneum, esophageal cancer, hepatocellular cancer, liver cancer (including HCC), gastric cancer, stomach cancer (including gastrointestinal cancer), pancreatic cancer, glioblastoma, cervical cancer, ovarian cancer, urothelial cancer, bladder cancer, hepatoma, glioma, brain cancer (as well as edema, such as that associated with brain tumors), breast cancer (including, for example, triple negative breast cancer), testis cancer, testicular germ cell tumors, colon cancer, colorectal cancer (CRC), colorectal cancer MSS (MSS-CRC); refractory MSS colorectal; MSS (microsatellite stable status), primary peritoneal cancer, primary peritoneal ovarian carcinoma, microsatellite stable primary peritoneal cancer, platinum resistant microsatellite stable primary peritoneal cancer, CRC (MSS unknown), rectal cancer, endometrial cancer (including endometrial carcinoma), uterine carcinoma, salivary gland carcinoma, kidney cancer, renal cell cancer (RCC), renal cell carcinoma (RCC), gastro-esophageal junction cancer, prostate cancer, vulval cancer, thyroid cancer, hepatic carcinoma, carcinoid carcinoma, head and neck cancer, B-cell lymphoma (including non-Hodgkin's lymphoma, as well as low grade/follicular non-Hodgkin's lymphoma (NHL), small lymphocytic (SL) NHL, intermediate grade/follicular NHL, intermediate grade diffuse NHL, Diffuse Large B cell lymphoma, high grade immunoblastic NHL, high grade lymphoblastic NHL, high grade small non-cleaved cell NHL, bulky disease NHL, mantle cell lymphoma, AIDS-related lymphoma, and Waldenstrom's Macroglobulinemia, Hodgkin's lymphoma (HD), chronic lymphocytic leukemia (CLL), acute lymphoblastic leukemia (ALL), T cell Acute Lymphoblastic Leukemia (T-ALL), Acute myeloid leukemia (AML), Hairy cell leukemia, chronic myeloblastic leukemia, multiple myeloma, post-transplant lymphoproliferative disorder (PTLD), abnormal vascular proliferation associated with phakomatoses, Meigs' syndrome, Merkel Cell cancer, MSI-high cancer, KRAS mutant tumors, adult T-cell leukemia/lymphoma, adenoid cystic cancer (including adenoid cystic carcinoma), melanoma, malignant melanoma, metastatic melanoma, pancreatic cancer, pancreatic adenocarcinoma, ovarian cancer (including ovarian carcinoma), pleural mesothelioma, cervical squamous cell carcinoma (cervical SCC), anal squamous cell carcinoma (anal SCC), carcinoma of unknown primary, gallbladder cancer, pleural mesothelioma, chordoma, endometrial sarcoma, chondrosarcoma, uterine sarcoma, uveal melanoma, amyloidosis, AL-amyloidosis, astrocytoma, and/or Myelodysplastic syndromes (MDS).

[0672] In some embodiments, the cancer for treatment using the anti-IL18-BP antibodies of the present invention includes cancer selected from the group consisting of renal clear cell carcinoma (RCC), lung cancer, NSCLC, lung adenocarcinoma, lung squamous cell carcinoma, gastric adenocarcinoma, ovarian cancer, endometrial cancer, breast cancer, triple negative breast cancer (TNBC), head and neck tumor, colorectal adenocarcinoma, melanoma, and metastatic melanoma.

### 2. Anti-IL-18BP Antibody Monotherapies

[0673] The IL-18BP antibodies of the invention find particular use in the treatment of cancer as a monotherapy. Due to the nature of an immuno-oncology mechanism of action, IL18-BP does not necessarily need to be overexpressed on or correlated with a particular cancer type; that is, the goal is to have the anti-IL18-BP antibodies de-suppress T cell and NK cell activation, such that the immune system will go after the cancers.

[0674] Any anti-IL-18 antibody of FIGS. 1-3 finds use as a monotherapy.

### 3. Anti-IL18BP Antibody Combination Therapies

[0675] As is known in the art, combination therapies comprising a therapeutic antibody targeting an immunotherapy target and an additional therapeutic agent, specific for the disease condition, are showing great promise. For example, in the area of immunotherapy, there are a number of promising combination therapies using a chemotherapeutic agent (either a small molecule drug or an anti-tumor antibody) or with an immuno-oncology antibody.

[0676] The terms “in combination with” and “co-administration” are not limited to the administration of said prophylactic or therapeutic agents at exactly the same time. Instead, it is meant that the antibody and the other agent or agents are administered in a sequence and within a time interval such that they may act together to provide a benefit that is increased versus treatment with only either the antibody of the present invention or the other agent or agents. It is preferred that the antibody and the other agent or agents act additively, and especially preferred that they act synergistically.

[0677] Accordingly, the antibodies of the present invention may be administered concomitantly with one or more other therapeutic regimens or agents. In some embodiments, the antibodies of the present invention are administered in the same formulation with one or more other therapeutic regimens or agents. In some embodiments, the antibodies of the present invention are administered in a separate and/or different formulation from the one or more other therapeutic regimens or agents. The additional therapeutic regimes or agents may be used to improve the efficacy or safety of the antibody. Also, the additional therapeutic regimes or agents may be used to treat the same disease or a comorbidity rather than to alter the action of the antibody. For example, an antibody of the present invention may be administered to the patient along with chemotherapy, radiation therapy, or both chemotherapy and radiation therapy.

[0678] In some embodiment, the anti-IL18 BP antibodies of the invention can be combined with one of a number of checkpoint receptor antibodies. In some embodiments, a patient's tumor may be evaluated for expression of receptors and the results then used to inform a clinician as to which antibodies to administer. Any anti-IL-18 antibody of FIGS. 1-3 finds use as part of a combination therapy.

a. Immune Checkpoint Inhibitor Combination Therapies

[0679] In some embodiments, the combination or composition further comprises an additional active agent, e.g., a second antigen binding protein. Optionally, the second antigen binding protein binds to a negative regulator of the immune system, an immune suppressor, or an immune checkpoint protein, including but not limited to PD-1, PD-L1, CTLA-4, PD-L2, B7-H3, B7-H4, CEACAM-1, TIGIT, PVR, LAG3, CD112, PVRIG, CD96, TIM3, and/or BTLA, or co-stimulatory receptor: ICOS, OX40, 41BB, CD27, and/or GITR. All patent documents listed in the section below are incorporated by reference in their entireties for all purposes.

[0680] In some embodiments, the anti-IL18-BP antibodies are used in combination with and antibody to an immune checkpoint inhibitor protein. In some embodiments, the immune checkpoint inhibitor protein is selected from the group consisting of an anti-PVRIG antibody, an anti-PD-1 antibody, an anti-PD-L1 antibody, an anti-TIGIT antibody, an anti-CTLA-4 antibody, an anti-PD-L2 antibody, an anti-B7-H3 antibody, an anti B7-H4 antibody, an anti-CEACAM-1 antibody, an anti-PVR antibody, an anti-LAG3 antibody, an anti-CD112 antibody, an anti-CD96 antibody, an anti-TIM3 antibody, an anti-BTLA antibody, an anti-ICOS antibody, an anti-OX40 antibody, or an anti-41BB antibody, an anti-CD27 antibody, or an anti-GITR antibody.

[0681] In some embodiments, the anti-IL18-BP antibodies are used in combination with one or more anti-PD-1 (e.g., anti-PD-1 targeting antibodies), including for example but not limited to nivolumab (Opdivo®; BMS; CheckMate078), pembrolizumab (KEYTRUDA®; Merck), TSR-042 (Tesaro), cemiplimab (REGN2810; Regeneron Pharmaceuticals, see US20170174779), BMS-936559, Spartalizumab (PDR001, Novartis), pidilizumab (CT-011; Pfizer Inc), Tislelizumab (BGB-A317, BeiGene), Camrelizumab (SHR-1210, Incyte and Jiangsu HengRui), SHR-1210 (CTR20170299 and CTR20170322), SHR-1210 (CTR20160175 and CTR20170090), Sintilimab(Tyvyt®; Eli lily and Innovent Biologics), Toripalimab (JS001, Shanghai Junshi Bioscience), JS-001 (CTR20160274), IBI308 (CTR20160735), BGB-A317 (CTR20160872), Penpulimab (AK105, Akeso Biopharma), Zimberelimab (Arcus), BAT1306 (Bio-Thera Solutions Ltd), Sasanlimab (PF-06801591, pfizer), Dostarlimab-gxly (GlaxoSmithKline LLC), Prolgolimab (Biocad), Cadonilimab (Akeso Inc), Geptanolimab (Genor BioPharma Co Ltd), Serplulimab (Shanghai Henlius Biotech Inc), Balstilimab (Agenus Inc), Retifanlimab (Incyte Corp), Cetrelimab (Johnson & Johnson), CS-1003 (EQRx Inc), IBI-318 (Innovent Biologics Inc), Ivonescimab (Akeso Inc), Pucotenlimab (Lepu Biopharma Co Ltd), QL-1604 (Qilu Pharmaceutical Co Ltd), SCTI-10A (SinoCelltech Group Ltd), Tebotelimab (MacroGenics Inc), AZD-7789 (AstraZeneca Plc), Budigalimab (AbbVie Inc), EMB-02 (EpimAb Biotherapeutics Inc), Ezabenlimab (Boehringer Ingelheim International GmbH), F-520 (Shandong New Time Pharmaceutical Co Ltd), HX-009 (Waterstone Hanxbio Pty Ltd), Zeluvalimab (Amgen), Peresolimab (Eli Lilly and Co), Rosnilimab (AnaptysBio Inc), Vudalimab (Xencor), Izuralimab (Xencor), Lorigerlimab (MacroGenics Inc), YBL-006 (Y-Biologics Inc), ONO-4685 (Ono Pharmaceutical Co Ltd), LY-3434172 (Eli Lilly and Co), and/or a PD-1 antibody as recited in US 2017/0081409 as well as others in development, which can be used in combination with the anti-IL18BP antibodies of the invention. Additional exemplary anti-PD-1 antibody sequences are shown in FIG. 39.

[0682] In some embodiments, pembrolizumab is administered as a dosage of about 2 mg/kg to 10 mg/kg. In some embodiments, pembrolizumab is administered as a dosage of about 2 mg/kg. In some embodiments, pembrolizumab is administered as a dosage of about 2 mg/kg. In some embodiments, pembrolizumab is administered as a dosage of about 3 mg/kg. In some embodiments, pembrolizumab is administered as a dosage of about 4 mg/kg. In some embodiments, pembrolizumab is administered as a dosage of about 5 mg/kg. In some embodiments, pembrolizumab is administered as a dosage of about 6 mg/kg. In some embodiments, pembrolizumab is administered as a dosage of about 7 mg/kg. In some embodiments, pembrolizumab is administered as a dosage of about 8 mg/kg. In some embodiments, pembrolizumab is administered as a dosage of about 9 mg/kg. In some embodiments, pembrolizumab is administered as a dosage of about 10 mg/kg.

[0683] In some embodiments, pembrolizumab is administered as a dosage of about no more than 2 mg/kg. In some embodiments, pembrolizumab is administered as a dosage of about 1 mg/kg to 2 mg/kg. In some embodiments, pembrolizumab is administered as a dosage of about 0.1 mg/kg to 1 mg/kg. In some embodiments, pembrolizumab is administered as a dosage of about 0.01 mg/kg to 0.1 mg/kg.

[0684] In some embodiments, pembrolizumab is administered as a dosage of about at least 10 mg/kg. In some embodiments, pembrolizumab is administered as a dosage of about 10 mg/kg to 20 mg/kg. In some embodiments, pembrolizumab is administered as a dosage of about 20 mg/kg to 30 mg/kg. In some embodiments, pembrolizumab is administered as a dosage of about 30 mg/kg to 40 mg/kg. In some embodiments, pembrolizumab is administered as a dosage of about 40 mg/kg to 50 mg/kg.

[0685] In some embodiments, pembrolizumab is administered about every 1 week to every 6 weeks. In some embodiments, pembrolizumab is administered about every week. In some embodiments, pembrolizumab is administered about every 2 weeks. In some embodiments, pembrolizumab is administered about every 3 weeks. In some embodiments, pembrolizumab is administered about every 4 weeks. In some embodiments, pembrolizumab is administered about every 5 weeks. In some embodiments, pembrolizumab is administered about every 6 weeks.

[0686] In some embodiments, pembrolizumab is administered as a dosage of about 2 mg/kg every 3 weeks. In some embodiments, pembrolizumab is administered as a dosage of about 10 mg/kg every 3 weeks. In some embodiments, pembrolizumab is administered as a dosage of about 200 mg every 3 weeks. In some embodiments, pembrolizumab is administered as a dosage of about 400 mg every 6 weeks.

[0687] In some embodiments, the pembrolizumab is administered over about 10 minutes, over about 15 minutes, over about 20 minutes, over about 25 minutes, over about 30 minutes, over about 35 minutes, or over about 40 minutes. In some embodiments, the pembrolizumab is administered over about 30 minutes+/−10 minutes.

[0688] Further disclosures of pembrolizumab are provided in https://www.accessdata.fda.gov/spl/data/157262d6-15e0-4b0a-968f-b99bab4aef50/157262d6-15e0-4b0a-968f-b99bab4aef50.xml, which is incorporated by reference herein in its entirety.

[0689] In some embodiments, the anti-IL18-BP antibodies are used in combination with one or more anti-PD-L1 antibody (e.g., anti-PD-L1 targeting antibodies). There are three approved anti-PD-L1 antibodies, atezolizumab (TECENTRIQ®; MPDL3280A; IMpowerl10; Roche/Genentech), avelumab (BAVENCIO®; MSB001071 8C; EMID Serono & Pfizer), and Durvalumab (MEDI4736; IMFINZI®; AstraZeneca). And other antibodies under development, for example, Lodapolimab (LY3300054, Eli Lily), Pimivalimab (Jounce Therapeutics Inc), SHR-1316 (Jiangsu Hengrui Medicine Co Ltd), Envafolimab (Jiangsu Simcere Pharmaceutical Co Ltd), sugemalimab (CStone Pharmaceuticals Co Ltd), cosibelimab (Checkpoint Therapeutics Inc), pacmilimab (CytomX Therapeutics Inc), IBI-318, IBI-322, IBI-323 (Innovent Biologics Inc), INBRX-105 (Inhibrx Inc), KN-046 (Alphamab Oncology), 6MW-3211 (Mabwell Shanghai Bioscience Co Ltd), BNT-311 (BioNTech SE), FS-118 (F-star Therapeutics Inc), GNC-038 (Systimmune Inc), GR-1405 (Genrix (Shanghai) Biopharmaceutical Co Ltd), HS-636 (Zhejiang Hisun Pharmaceutical Co Ltd), LP-002 (Lepu Biopharma Co Ltd), PM-1003 (Biotheus Inc), PM-8001 (Biotheus Inc), STIA-1015 (ImmuneOncia Therapeutics LLC), ATG-101 (Antengene Corp Ltd), BJ-005 (BJ Bioscience Inc), CDX-527 (Celldex Therapeutics Inc), GNC-035 (Systimmune Inc), GNC-039(Systimmune Inc), HLX-20 (Shanghai Henlius Biotech Inc), JS-003 (Shanghai Junshi Bioscience Co Ltd), LY-3434172 (Eli Lilly and Co), MCLA-145 (Merus NV), MSB-2311 (Transcenta Holding Ltd), PF-07257876 (Pfizer Inc), Q-1802 (QureBio Ltd), QL-301 (QLSF Biotherapeutics Inc), QLF-31907 (Qilu Pharmaceutical Co Ltd), RC-98 (RemeGen Co Ltd), TST-005 (Transcenta Holding Ltd), Atezolizumab (IMpower133), BMS-936559/MDX-1105, and/or RG-7446/MPDL3280A, and/or YW243.55.570. In some embodiments, the PD-L1 antibody is one described in U.S. Patent Publication No. 2017/0281764 as well as WO 2013/079174 (avelumab) and WO 2010/077634 (or US 2016/0222117 or U.S. Pat. No. 8,217,149; atezolizumab). In some embodiments, the PD-L1 antibody comprises a heavy chain sequence of SEQ ID NO: 34 and a light chain sequence of SEQ ID NO: 36 (from US 2017/281764), as well as others in development, which can be used in combination with the anti-IL18BP antibodies of the invention. Additional exemplary anti-PD-L1 antibody sequences are shown in FIG. 40.

[0690] In some embodiments, the anti-IL18-BP antibodies are used in combination with one or more anti-PD-L2 antibodies (e.g., anti-PD-L2 targeting antibodies). Examples of anti-PD-L2 antibodies include for example but are not limited to anti-PD-L2 antibodies as described in WO 2010/036959, anti-PD-L2 antibodies as described in WO 20140/22758, as well as others in development, which can be used in combination with the anti-IL18-BP antibodies of the invention.

[0691] In some embodiments, the anti-IL18-BP antibodies are used in combination with one or more anti-CTLA-4 antibodies (e.g., anti-CTLA-4 targeting antibodies). Examples of anti-CTLA-4 antibody include for example but are not limited to the FDA approved antibody ipilimumab and tremelimumab. In some embodiments, an anti-CTLA-4 antibodies include for example but are not limited to Yervoy® (ipilimumab or antibody 10D1, described in PCT Publication WO 01/14424), tremelimumab (formerly ticilimumab, CP-675,206), monoclonal or an anti-CTLA-4 antibody described in any of the following publications: WO 98/42752; WO 00/37504; U.S. Pat. No. 6,207,156; Hurwitz et al., Pro. Natl. Acad. Sci. USA, 95(17): 10067-10071 (1998); Camacho et al., (2004) J. Clin. Oncology, 22(145): antibodiestract No. 2505 (antibody CP-675206); and Mokyr et al., Cancer Res., 58:5301-5304 (1998). Any of the anti-CTLA-4 antibodies disclosed in WO2013/173223 can also be used, as well as others in development, which can be used in combination with the anti-IL18-BP antibodies of the invention.

[0692] In some embodiments, the anti-IL18-BP antibodies are used in combination with one or more anti-B7H3 antibodies (e.g., anti-B7H3 targeting antibodies). Examples of anti-B7H3 antibodies include the antibodies under clinical study, for example, Enoblituzumab (MGA271; MacroGenics), and anti-B7H3 antibodies as described WO 2016/033225, anti-B7H3 antibodies as outlined U.S. Pat. No. 9,441,049, as well as others in development, which can be used in combination with the anti-IL18BP antibodies of the invention.

[0693] In some embodiments, the anti-IL18-BP antibodies are used in combination with one or more anti-B7H4 antibodies (e.g., anti-B7H4 targeting antibodies). Examples of anti-B7H4 antibodies include for example but are not limited to anti-B7H4 monoclonal antibody from FivePrime, FPA150, which is currently in clinical phase I, antibodies as described in WO 2022/002012, as well as others in development, which can be used in combination with the anti-IL18BP antibodies of the invention.

[0694] In some embodiments, the anti-IL18-BP antibodies are used in combination with one or more anti-Carcinoembryonic antigen-related cell adhesion molecule-1 antibodies, also known as anti-CEACAMI antibody, or anti-CD66a antibody. Examples of anti-CEACAM-1 antibodies include for example but are not limited to the antibodies under clinical study, for example, Besilesomab (TheraPharm), AMG211 (Amgen), and CM-24 (MK-6018, KitovPharma).

[0695] Examples of anti-CEACAM-1 antibodies also include antibodies as outlined in US20200277398A1(CM-24 in development by Famewave Ltd), antibodies as outlined in U.S. Pat. No. 9,072,797B2 (a CD66-binding component and radionuclide yttrium-90 (90Y)), as well as others in development, which can be used in combination with the anti-IL18-BP antibodies of the invention.

[0696] In some embodiments, the anti-IL18-BP antibodies are used in combination with one or more anti-PVR antibodies (e.g., anti-PVR targeting antibodies). Examples of anti-PVR antibodies include for example but are not limited to antibodies as described in WO 2017/149538, of anti-PVR antibodies include antibodies as described in WO 2021/070181. In some embodiments, the second agent is selected from one or more of an antagonist of PVRL1, PVRL2, PVRL3, PVRL4, and CD155, for example, ASG-22CE (Astellas Pharm/a Inc), Enfortumab (Astellas Pharma), as well as others in development, which can be used in combination with the anti-IL18-BP antibodies of the invention.

[0697] In some embodiments, the anti-IL18-BP antibodies are used in combination with one or more anti-LAG3 antibodies (e.g., anti-LAG3 targeting antibodies). Examples of anti-LAG3 antibodies include for example but are not limited to antibodies under clinical study, for example, LAG525 (Novartis), TSR-033 (Tesaro), Fianlimab (REGN3767, Regeneron), BI-754111 (Boehringer Ingelheim), Sym-022 (Symphogen), R07247669 (Roch), BMS-986016 (see, WO 2010/019570), GSK2831781 (see, US 2016/0017037), and Merck clones 22D2, 11C9, 4A10, and/or 19E8 (see, WO 2016/028672) and antibodies comprising the CDRs or variable regions of antibodies 25F7, 26H10, 25E3, 8B7, 11F2 or 17E5, which are described in US 2011/0150892, WO 2010/19570 and WO 2014/008218. Other art recognized anti-LAG-3 antibodies that can be used include EVIP731 and IMP-321, described in US 2011/007023, WO 2008/132601, and WO 2009/44273. Anti-LAG-3 antibodies that compete with and/or bind to the same epitope as that of any of these antibodies can also be used in combination treatments, as well as others in development, which can be used in combination with the anti-IL18-BP antibodies of the invention.

[0698] In some embodiments, the anti-IL18-BP antibodies are used in combination with one or more anti-CD112 (also referred to as PVRL2; and including e.g., anti-CD112 targeting antibodies)) antibodies. Examples of anti-CD112 antibodies include for example but are not limited to anti-CD112 antibodies as outlined in US 2020/0040081, anti-CD112 antibodies as outlined in US 2019/0040154 or anti-CD112 antibodies as outlined in WO 2017/021526, as well as others in development, which can be used in combination with the anti-IL18-BP antibodies of the invention.

[0699] In some embodiments, the anti-IL18-BP antibodies are used in combination with one or more anti-CD96 antibodies (e.g., anti-CD96 targeting antibodies). Examples of anti-CD96 antibodies include for example but are not limited to anti-CD96 antibodies as outlined in WO 2019/091449, anti-CD96 antibodies as outlined in WO 2021042019, as well as others in development, which can be used in combination with the anti-IL18-BP antibodies of the invention.

[0700] In some embodiments, the anti-IL18-BP antibodies are used in combination with one or more anti-TIM3 antibodies (e.g., anti-TIM3 targeting antibodies). Examples of anti-TIM3 antibodies include antibodies under clinical study, for example, Sabatolimab (Novartis), TSR-022 (Tesaro), INCAGN02385 (Incyte Corporation), INCAGNO2390 (Incyte Corporation), BGB-A425 (BeiGene), LY3321367 (Eli Lilly), BMS986258, as well as others in development, which can be used in combination with the anti-IL18-BP antibodies of the invention.

[0701] In some embodiments, the anti-IL18-BP antibodies are used in combination with one or more anti-BTLA antibodies (e.g., anti-BTLA targeting antibodies). Examples of anti-BTLA antibodies include for example but are not limited to JS004 (Shanghai Junshi Bioscience), anti-BTLA antibodies disclosed in WO 2011/014438, as well as others in development, which can be used in combination with the anti-IL18-BP antibodies of the invention.

[0702] In some embodiments, the anti-IL18-BP antibodies are used in combination with one or more anti-ICOS antibodies (e.g., anti-ICOS targeting antibodies). Examples of anti-ICOS antibodies include for example but are not limited to anti-ICOS antibodies under clinical study, for example, MEDI-570 (MedImmune), Vopratelimab (Jounce Therapeutics), KY1044 (Kymab Limited), Feladilimab (GlaxoSmithKline). Examples of anti-ICOS antibodies also include anti-ICOS antibodies as outlined in U.S. Pat. No. 9,957,323, anti-ICOS antibodies as outlined in WO 2016/120789, anti-ICOS antibodies as outlined in WO 2016/154177, as well as others in development, which can be used in combination with the anti-IL18-BP antibodies of the invention.

[0703] In some embodiments, the anti-IL18-BP antibodies are used in combination with one or more anti-OX40 antibodies (e.g., anti-OX-40 targeting antibodies). Examples of anti-OX40 antibodies include for example but are not limited to anti-OX40 antibodies under clinical study, for example, PF-04518600 (Pfizer), BAT6026 (Bio-Thera Solutions), MEDI6469, MEDI-0562, MEDI6962 (MedImmune), BMS 986178, GSK3174998, ABBV-368 (AbbVie), ATOR-1015 (Alligator Bioscience). Examples of anti-OX40 antibodies also include anti-OX40 antibodies as outlined in U.S. Pat. No. 10,730,951, anti-OX40 antibodies as outlined in U.S. Pat. No. 10,851,173, as well as others in development, which can be used in combination with the anti-IL18-BP antibodies of the invention.

[0704] In some embodiments, the anti-IL18-BP antibodies are used in combination with one or more anti-41BB antibodies (e.g., anti-41BB targeting antibodies). Examples of anti-41BB antibodies include for example but are not limited to utomilumab (Pfizer, PF-05082566), LVGN6051 (Lyvgen Biopharma), ATOR-1017 (Alligator Bioscience), BMS-663513, anti-41BB antibodies as outlined in U.S. Pat. No. 10,501,551, as well as others in development, which can be used in combination with the anti-IL18-BP antibodies of the invention.

[0705] In some embodiments, the anti-IL18-BP antibodies are used in combination with one or more anti-CD27 antibodies (e.g., anti-CD27 targeting antibodies). Examples of anti-CD27 antibodies include for example but are not limited to but are not limited to Varlilumab (CDX-1127, Leap Therapeutics), anti-CD27 antibodies as outlined in US 2020/0277393, anti-CD27 antibodies as outlined in WO 2019/195452, as well as others in development, which can be used in combination with the anti-IL18-BP antibodies of the invention.

[0706] In some embodiments, the anti-IL18-BP antibodies are used in combination with one or more anti-GITR antibodies (e.g., anti-GITR targeting antibodies). Clinical study examples of anti-GITR antibodies include for example but are not limited to but are not limited to MK-4166, MK-1248 (Merck Sharp & Dohme), BMS-986156, INCAGN01876 (Incyte Corporation), OMP-336B11 (OncoMed Pharmaceuticals), MEDI1873 (MedImmune). Examples of anti-GITR antibodies also include but are not limited to anti-GITR antibodies as described in n WO 2016/196792, anti-GITR antibody described in WO 2015/187835, the contents of which are herein incorporated by reference, e.g., antibodies having the heavy and light chain variable region CDRs, heavy and light chain variable regions, or heavy and light chains of antibodies 28F3, 19D3, 18E10, 3C3-1, 3C3-2, 2G6, 9G7-1, 9G7-2, 14E3, 19H8-1, 19H8-2, and/or 6G10, and variants thereof. The sequences of the antibodies described in WO 2015/187835 are provided in Table 2 (see SEQ ID NOs: 5-14 and 27-228). The patient may also be treated with any other anti-GITR antibodies, e.g., TRX518 (Leap Therapeutics), MK-4166 (Merck), LKZ-145 (Novartis), GWN-323 (Novartis Pharmaceuticals Corp.), Medi 1873 (Medlmmune), INBRX-110 (Inhibrx), GITR-Fc protein (OncoMed) and antibodies described in WO 2006/105021, WO 2009/009116, WO 2011/028683, US 2014/0072565, US 2014/0072566, US 2014/0065152, WO 2015/031667, WO 2015/184099, WO 2015/184099, or WO 2016/054638.

[0707] In some embodiments, the anti-IL18-BP antibodies are used in combination with one or more anti-TIGIT antibodies. Examples of anti-TIGIT antibodies include for example but are not limited to CPA.9.083.H4(S241P), CPA.9.086.H4(S241P), CHA.9.547.7.H4(S241P), CHA.9.547.13.H4(S241P), CPA.9.018, CPA.9.027, CPA.9.049, CPA.9.057, CPA.9.059, CPA.9.083, CPA.9.086, CPA.9.089, CPA.9.093, CPA.9.101, CPA.9.103, CHA.9.536.3.1, CHA.9.536.3, CHA.9.536.4, CHA.9.536.5, CHA.9.536.7, CHA.9.536.8, CHA.9.560.1, CHA.9.560.3, CHA.9.560.4, CHA.9.560.5, CHA.9.560.6, CHA.9.560.7, CHA.9.560.8, CHA.9.546.1, CHA.9.547.1, CHA.9.547.2, CHA.9.547.3, CHA.9.547.4, CHA.9.547.6, CHA.9.547.7, CHA.9.547.8, CHA.9.547.9, CHA.9.547.13, CHA.9.541.1, CHA.9.541.3, CHA.9.541.4, CHA.9.541.5, CHA.9.541.6, CHA.9.541.7 and CHA.9.541.8, CHA.9.547.18 as disclosed in WO 2018/220446 and other antibodies under clinical study, for example, EOS-448 (GlaxoSmithKline, iTeos Therapeutics), BMS-986207, domvanalimab (AB154, Arcus Biosciences, Inc.), AB308 (Arcus Bioscience), Ociperlimab (aBGB-A1217, BeiGene), Tiragolumab (MTIG7192A, Roche), BAT6021 (Bio-Thera Solutions), BAT6005 (Bio-Thera Solutions), IBI939 (Innovent Biologics, US2021/00040201), JS006 (Junshi Bioscience/COHERUS), ASP8374 (Astellas Pharma Inc), Vibostolimab (MK-7684, Merck Sharp & Dohme), M6332 (Merck KGAA), Etigilimab (OMP-313M32, Mereo BioPharma), SEA-TGT (Seagen)y, HB0030 (Huabo Biopharma), AK127 (AKESO), or anti-TIGIT antibodies include the Genentech antibody (MTIG7192A). In some embodiments, the anti-TIGIT antibodies are as described in U.S. Pat. No. 9,713,364 (including MAB1, MAB2, MAB3, MAB4, MAB5, MAB6, MAB7, MAB8, MAB9, MAB10, MAB11, MAB12, MAB13, MAB14, MAB15, MAB16, MAB17, MAB18, 40 MAB19, MAB20, and/or MAB21), anti-TIGIT antibodies are as described in U.S. Pat. No. 9,499,596, anti-TIGIT antibodies are as described in WO 2016/191643, anti-TIGIT antibodies are as described in WO 2017/053748, anti-TIGIT antibodies are as described in WO2016/191643, anti-TIGIT antibodies are as described in WO 2016/028656, anti-TIGIT antibodies are as described in WO 2017/030823, anti-TIGIT antibodies are as described in US 2016/0176963, anti-TIGIT antibodies are as described in WO 2017/037707, anti-TIGIT antibodies are as described in WO 2017/059095, anti-TIGIT antibodies are as described in U.S. 2017281764, anti-TIGIT antibodies as described in WO 2015/009856, the anti-TIGIT antibody is an antibody described in any of US 2017/0037133, the anti-TIGIT antibody as described in WO 2017/048824 (including 10A7, 1F4, 14A6, 28H5, 31C6, 15A6, 22G2, 11G11, and/or 10D7) as disclosed in, anti-TIGIT antibody is one of those described in International Patent Publication WO 2016/028656. In some embodiments, the anti-TIGIT antibodies, usually full length or scFv domains, that comprise the following CHA sets of CDRs, the sequences of which are shown in FIG. 30A: CPA.9.083.H4(S241P)vhCDR1, CPA.9.083.H4(S241P)vhCDR2, CPA. 9.083.H4(S241P)vhCDR3, CPA.9.083.H4(S241P)vlCDR1, CPA.9.083.H4(S241P)vlCDR2, and CPA.9.083.H4(S241P)vlCDR3. In some embodiments, the anti-TIGIT antibodies, usually full length or scFv domains, that comprise the following CHA sets of CDRs, the sequences of which are shown in FIG. 30B: CPA.9.086.H4(S241P)vhCDR1, CPA.9.086.H4(S241P)vhCDR2, CPA.9.086.H4(S241P)vhCDR3, CPA. 9.086.H4(S241P)vlCDR1, CPA.9.086.H4(S241P)vlCDR2, and CPA. 9.086.H4(S241P)vlCDR3. Such anti-TIGIT antibodies can be used in combination with the anti-IL18-BP antibodies of the invention. Additional exemplary anti-TIGIT antibody sequences are shown in FIG. 34.

[0708] In some embodiments, the anti-IL18-BP antibodies are used in combination with one or more anti-PVRIG antibodies. Examples of anti-PVRIG antibodies include for example but are not limited to but are not limited to CHA.7.518.1.H4(S241P), CHA.7.538.1.2.H4(S241P), and CHA.7.502, CHA.7.503, CHA.7.506, CHA.7.508, CHA.7.510, CHA.7.512, CHA.7.514, CHA.7.516, CHA.7.518.1.H4(S241P), CHA.7.518, CHA.7.518.4, CHA.7.520.1, CHA.7.520.2, CHA.7.522, CHA.7.524, CHA.7.526, CHA.7.527, CHA.7.528, CHA.7.530, CHA.7.534, CHA.7.535, CHA.7.537, CHA.7.538.1.2.H4(S241P), CHA.7.538.1, CHA.7.538.2, CHA.7.543, CHA.7.544, CHA.7.545, CHA.7.546, CHA.7.547, CHA.7.548, CHA.7.549, CHA.7.550, CPA.7.001, CPA.7.003, CPA.7.004, CPA.7.006, CPA.7.008, CPA.7.009, CPA.7.010, CPA.7.011, CPA.7.012, CPA. 7.013, CPA.7.014, CPA.7.015, CPA.7.017, CPA.7.018, CPA.7.019, CPA.7.021, CPA.7.022, CPA.7.023, CPA.7.024, CPA.7.033, CPA.7.034, CPA.7.036, CPA.7.040, CPA.7.046, CPA.7.047, CPA.7.049, and CPA.7.050, as disclosed in WO 2018/220446A9 and other antibodies under clinical study, for example, GSK4381562/SRF816 (GSK/Surface), NTX2R13 (Nectin Therapeutics). In some embodiments, the antibody sequences is from WO 201/6134333. In some embodiments, the anti-PVRIG antibodies, usually full length or scFv domains, comprise the following CHA sets of CDRs, the sequences of which are shown in FIG. 29A: CHA.7.518.1.H4(S241P)vhCDR1, CHA.7.518.1.H4(S241P)vhCDR2, CHA.7.518.1.H4(S241P)vhCDR3, CHA.7.518.1.H4(S241P)vlCDR1, CHA.7.518.1.H4(S241P)vlCDR2, and CHA.7.518.1.H4(S241P)vlCDR3. In some embodiments, the anti-PVRIG antibodies, usually full length or scFv domains, that comprise the following CHA sets of CDRs, the sequences of which are shown in FIG. 30B: CHA.7.538.1.2.H4(S241P)vhCDR1, CHA.7.538.1.2.H4(S241P)vhCDR2, CHA.7.538.1.2.H4(S241P)vhCDR3, CHA.7.538.1.2.H4(S241P)vlCDR1, CHA.7.538.1.2.H4(S241P)vlCDR2, and CHA.7.538.1.2.H4(S241P)vlCDR3. Such anti-PVRIG antibodies can be used in combination with the anti-IL18-BP antibodies of the invention. Additional exemplary anti-PVRIG antibody sequences are shown in FIGS. 36, 37, and 38.

b. Other Cancer Combination Therapies

[0709] The anti-IL-18BP antibodies of the present invention may be administered in combination with one or more other prophylactic or therapeutic agents, including but not limited to cytotoxic agents, chemotherapeutic agents, cytokines, growth inhibitory agents, anti-hormonal agents, kinase inhibitors, anti-angiogenic agents, cardioprotectants, immunostimulatory agents, immunosuppressive agents, agents that promote proliferation of hematological cells, angiogenesis inhibitors, protein tyrosine kinase (PTK) inhibitors, or other therapeutic agents.

[0710] In this context, a “chemotherapeutic agent” is a chemical compound useful in the treatment of cancer. Examples of chemotherapeutic agents include alkylating agents such as thiotepa and cyclosphosphamide, alkyl sulfonates such as busulfan, improsulfan and piposulfan; aziridines such as benzodopa, carboquone, meturedopa, and uredopa; ethylenimines and methylamelamines including altretamine, triethylenemelamine, triethylenephosphoramide, triethylenethiophosphoramide and trimethylolomelamine; acetogenins (especially bullatacin and bullatacinone); delta-9-tetrahydrocannabinol (dronabinol, MARINOL'); beta-lapachone; lapachol; colchicines; betulinic acid; a camptothecin (including the synthetic analogue topotecan (HYCAMTN®), CPT-11 (irinotecan, CAMPTOSAR®), acetylcamptothecin, scopolectin, and 9-aminocamptothecin); bryostatin; callystatin; CC-1065 (including its adozelesin, carzelesin and bizelesin synthetic analogues); podophyllotoxin; podophyllinic acid; teniposide; cryptophycins (particularly cryptophycin 1 and cryptophycin 8); dolastatin; duocarmycin (including the synthetic analogues, KW-2189 and CB1-TM1); eleutherobin; pancratistatin; a sarcodictyin; spongistatin; nitrogen mustards such as chlorambucil, chlornaphazine, cholophosphamide, estramustine, ifosfamide, mechlorethamine, mechlorethamine oxide hydrochloride, melphalan, novembichin, phenesterine, prednimustine, trofosfamide, uracil mustard; nitrosoureas such as carmustine, chlorozotocin, fotemustine, lomustine, nimustine, and ranimnustine; antibiotics such as the enediyne antibiotics (e.g., calicheamicin, especially calicheamicin gammall and calicheamicin omegall (see, e.g., Agnew, Chem Intl. Ed. Engl., 33: 183-186 (1994)); dynemicin, including dynemicin A; an esperamicin; as well as neocarzinostatin chromophore and related chromoprotein enediyne antiobiotic chromophores), aclacinomysins, actinomycin, authramycin, azaserine, bleomycins, cactinomycin, carabicin, carminomycin, carzinophilin, chromomycins, dactinomycin, daunorubicin, detorubicin, 6-diazo-5-oxo-L-norleucine, doxorubicin (including morpholino-doxorubicin, cyanomorpholino-doxorubicin, 2-pyrrolino-doxorubicin and deoxydoxorubicin), epirubicin, esorubicin, idarubicin, marcellomycin, mitomycins such as mitomycin C, mycophenolic acid, nogalamycin, olivomycins, peplomycin, porfiromycin, puromycin, quelamycin, rodorubicin, streptonigrin, streptozocin, tubercidin, ubenimex, zinostatin, zorubicin; anti-metabolites such as methotrexate and 5-fluorouracil (5-FU); folic acid analogues such as denopterin, methotrexate, pteropterin, trimetrexate; purine analogs such as fludarabine, 6-mercaptopurine, thiamiprine, thioguanine; pyrimidine analogs such as ancitabine, azacitidine, 6-azauridine, carmofur, cytarabine, dideoxyuridine, doxifluridine, enocitabine, floxuridine; androgens such as calusterone, dromostanolone propionate, epitiostanol, mepitiostane, testolactone; anti-adrenals such as aminoglutethimide, mitotane, trilostane; folic acid replenisher such as frolinic acid; aceglatone; aldophosphamide glycoside; aminolevulinic acid; eniluracil; amsacrine; bestrabucil; bisantrene; edatraxate; defofamine; demecolcine; diaziquone; elfornithine; elliptinium acetate; an epothilone; etoglucid; gallium nitrate; hydroxyurea; lentinan; lonidainine; maytansinoids such as maytansine and ansamitocins; mitoguazone; mitoxantrone; mopidanmol; nitraerine; pentostatin; phenamet; pirarubicin; losoxantrone; 2-ethylhydrazide; procarbazine; PSK® polysaccharide complex (JHS Natural Products, Eugene, Oreg.); razoxane; rhizoxin; sizofiran; spirogermanium; tenuazonic acid; triaziquone; 2,2′,2″-trichlorotriethylamine; trichothecenes (especially T-2 toxin, verracurin A, roridin A and anguidine); urethan; vindesine (ELDISINE®, FILDESIN®); dacarbazine; mannomustine; mitobronitol; mitolactol; pipobroman; gacytosine; arabinoside (“Ara-C”); thiotepa; taxoids, e.g., paclitaxel (TAXOL®; Bristol-Myers Squibb Oncology, Princeton, N.J.), ABRAXANE®, cremophor-free, albumin-engineered nanoparticle formulation of paclitaxel (American Pharmaceutical Partners, Schaumberg, Ill.), and docetaxel (TAXOTERE®; Rhone-Poulenc Rorer, Antony, France); chloranbucil; gemcitabine (GEMZARM®); 6-thioguanine; mercaptopurine; methotrexate; platinum analogs such as cisplatin and carboplatin; vinblastine (VELBAN®); platinum; etoposide (VP-16); ifosfamide; mitoxantrone; vincristine (ONCOVIN®); oxaliplatin; leucovovin; vinorelbine (NAVELBINE®); novantrone; edatrexate; daunomycin; aminopterin; ibandronate; topoisomerase inhibitor RFS 2000; difluoromethylornithine (DMFO); retinoids such as retinoic acid; capecitabine (XELODA®); pharmaceutically acceptable salts, acids or derivatives of any of the above; as well as combinations of two or more of the above such as CHOP, an abbreviation for a combined therapy of cyclophosphamide, doxorubicin, vincristine, and prednisolone; CVP, an abbreviation for a combined therapy of cyclophosphamide, vincristine, and prednisolone; and FOLFOX, an abbreviation for a treatment regimen with oxaliplatin (ELOXATIN®) combined with 5-FU and leucovoin.

[0711] In some embodiments, the chemotherapeutic agent is selected from the group consisting of Platinum, Oxaliplatin, Cisplatin, Paclitaxel (taxol), Sorafenib, Doxorubicin, Sorafenib, 5-FU, and Gemcitabine, Irinotecan (CPT-11).

[0712] In some embodiments, the other therapeutic is an agent used in radiation therapy for the treatment of cancer. Accordingly, in some embodiments, the active agents described herein are administered in combination with one or more of platinum coordination compounds, topoisomerase inhibitors, antibiotics, antimitotic alkaloids and difluoronucleosides.

[0713] In some embodiments, the anti-IL18BP antibody is in combination with one or more inflammasome activators. In some embodiments, the inflammasome activator is an CD39 inhibitor. In some embodiments, the CD39 inhibitor is an anti-CD39 antibody.

[0714] According to at least some embodiments, the anti IL18BP antibodies could be used in combination with any of the known in the art standard of care cancer treatment (as can be found, for example, on the World Wide Web at cancer.gov/cancertopics).

### EXAMPLES

### Example 1: Expression of IL18 and IL18BP in the Tumor Microenvironment

[0715] IL18-BP is a sequester for IL18 and results in inhibition of IL18 activity (Dinarello, et al., Front. Immunol., 1:1-10 (2013). Therefore, both IL18-BP, the target of antibody, as well as IL18 need to be present in the TME (Tumor Micro Environment) in order for the blocking of IL18-BP to be effective. FIG. 4 shows the expression of both IL18 (FIG. 4A) and IL18-BP (FIG. 4B) and demonstrated that both proteins are expressed across all TCGA tumors, with only Pheochromocytoma and Paraganglioma (see Table 1 for TCGA tumor type abbreviations; exhibiting somewhat limited expression for IL18 in a subset of these tumor type (reference line at 1 RPKM donates background expression levels below it). The eventual target cells for free IL18 are leukocyte/lymphocytes (Tominaga, K., et al., International Immunology, 12(2): 151-160 (2000) and Senju, H., et al., Int J Biol Sci., 14(3):331-340 (2018)), and these studies will target tumors which exhibit higher immune presence, as demonstrated by the IFNγinflammation signature (see, for example, US 2016/0312295 A1). As can be seen in FIG. 5, both IL18 (FIG. 5A) and IL18-BP (FIG. 5B) were prevalent across all tumor subsets with inflamed tumors (high IFNγsignature values). Even in lowest IFNγ subsets a significant expression of both proteins was detected. As IL18 relies on the inflammasome for its secretion, a signature of core inflammasome genes was generated. These genes are common to multiple types of inflammasome activation signals (Chauhan, D., et al., Immunological Reviews, 297:123-138 (2020)). The signature values were calculated as the mean of the log 10 RPKM expression values of the genes listed in Table 2. As shown in FIG. 6A, the core inflammasome signature was highly expressed in all TMEs, and in general had a higher expression in inflamed (high IFNγsignature) subsets. This pattern was very similar to the one presented for IL18 (FIG. 5A) indicating that the machinery for IL18 was present in all inflamed (high IFNγsignature) tumors and most low IFNγsignature tumors, except for LGG and PCPG. In order to validate that indeed IL18 and the inflammasome core signature genes were expressed in the same cells in the TME single cell data was used and the cosine similarity between IL18, IL18-BP, and the core inflammasome genes was calculated, as well as additional upstream genes and the IL18 receptors. In FIG. 6B, the cosine similarity matrix for macrophages in NSCLC are presented, indicating that indeed IL18 and the core inflammasome signature were present in the same cells. Similar results were obtained in additional tumor types (data not shown). Specifically, in breast cancer it was reported that Triple Negative breast cancer has more inflamed characteristics in about 30% of the cases, as compared to ˜5-10% in hormone receptor positive types (Thomas, F., et al., Frontiers in Oncology, 10:1-17 (2021)). Therefor we checked specifically in the expression of IL18 and IL18-BP in breast cancer by single cell (raw data adopted from Bassez, A., et al., Nature Medicine, 27:820-832 (2021)). In FIG. 7A, it is shown that both IL18 and IL18-BP are more abundant in TNBC, both by precent of expressing cells and average level of expression, flowed by HER2+ subset and with minimal expression in hormone receptor positive subsets, especially in the pre-treatment samples. In this specific dataset the patients were sampled pre-treatment then neoadjuvant treatment with aPD1 or aPD1 with chemotherapy was administered flowed by resection of the tumor (on treatment biopsies). The authors measured T-cell clonality expansion post treatment, T-cell clonal expansion could be regarded as a surrogate measurement for response to aPD1 treatment (Bassez et al., Nature Medicine, 27:820-832 (2021)). FIG. 7B demonstrates that baseline levels of IL18 were lower in non-expanding patients while IL18-BP is higher in these patients. This could be an indicator for the potential role of IL18-BP to attenuate the IL18 activity and hamper the activity of immune checkpoint blockade (ICB) treatment. Both genes were up regulated post aPD1 treatment. These observations strengthen the selection of more inflamed indication in general and specifically TNBC.

### Materials and Methods

### Preprocessing, Filtering, and Normalization

[0716] UMIs were quantified using Cellranger 3.0.2 (10× Genomics) with reference transcriptome GRCh38. Subsequent analyses were performed using “Seurat” (https://satijalab.org/seurat/), if not stated otherwise.

### Clustering and Cell Type Annotation

[0717] Top 15 principal components were used to construct SNN graph and UMAP embedding. Cell annotation for Thomas et al. 2021 was based on authors submitted metadata.

[0718] Cells are clustered by a nested PCA. The clusters are annotated by their gene signatures expression.

[0719] Cosine similarity matrix for a desired set of genes is computed by computing for each pair of genes and their expression vectors the value of formulae (i):

$$\frac{〈 \vec{x} , \vec{y} 〉}{‖ \vec{x} ‖ ‖ \vec{y} ‖} . \qquad formulae ( i )$$

[0720] The IFNγinflammation signature (as described in, US 2016/0312295 A1, incorporate by reference herein in its entirety) is calculated in three steps:
[0721] 1. An IFNγ_up signature is calculated as the mean of the log 10 RPKM expression values of the following genes:
   [0722] CCR5, HLA-DRA, CXCL13, CCL5, STAT1, KLRK1, NKG7, CXCL9, LAIR1, LAG3, CXCR6, KLRD1, GZMA, PRF1, SIGLEC14, PTPN22, CD86, SLA, SIRPG, CD72, HAVCR2, PSTPIP2, SLAMF6, CD84, CD300LF, CD3D, IFNG, CXCL11, CD2, CTSZ, GZMB, IL2RG, CXCL10, LILRB4, PDCD1, CCL8, CIITA, CCL4, IGSF6, PTPRC, CLEC9A, CST7, MYLIP, ITGAL, CDH1, PSTPIP1, GZMK, HLA-E, CD3E, TAGAP, TNFRSF9
[0723] 2. The IFNγ_down signature is calculated as the mean of the log 10 RPKM expression values of the following genes:
   [0724] CLEC3B, NR4A2, EEF1G, PTK3CA, TYRO3, CX3CL1, ING1, BST1, ACKR3, UBB, PPARG, PTEN, THY1, CLCA1, EFEMPI, GAS6, JTM2A, CD55, NFATC1, BCL6, RETNLB, PDCD4, TINP3, CDO1, POLRIB, DDR1, F2R, CTSG, LIL, RA5, CX3CR1, TBP, CLECIB, RGS16, PTPN13, IRF1, MONiB, CPD, PHACTR2, OAZ1, CASP3, F16, JTGA1, RPL 19, CCR6, LTK, ClOorf54, SLAMF, and TNFAP8L2
[0725] 3. Finally, the TFNγ inflammation signature is calculated as the difference between the two signatures: IFNγIFNγ_up−IFNγ_down.

### Clustering and Cell Type Annotation

[0726] Top 15 principal components were used to construct SNN graph and UMAP embedding.

TABLE 1
TCGA tumor abbreviation.

| Study | |
|---|---|
| Abbreviation | Study Name |
| LAML | Acute Myeloid Leukemia |
| ACC | Adrenocortical carcinoma |
| BLCA | Bladder Urothelial Carcinoma |
| LGG | Brain Lower Grade Glioma |
| BRCA | Breast invasive carcinoma |
| CESC | Cervical squamous cell carcinoma and |
| | endocervical adenocarcinoma |
| CHOL | Cholangiocarcinoma |
| LCML | Chronic Myelogenous Leukemia |
| COAD | Colon adenocarcinoma |
| CNTL | Controls |
| ESCA | Esophageal carcinoma |
| FPPP | FFPE Pilot Phase II |
| GBM | Glioblastoma multiforme |
| HNSC | Head and Neck squamous cell carcinoma |
| KICH | Kidney Chromophobe |
| KIRC | Kidney renal clear cell carcinoma |
| KIRP | Kidney renal papillary cell carcinoma |
| LIHC | Liver hepatocellular carcinoma |
| LUAD | Lung adenocarcinoma |
| LUSC | Lung squamous cell carcinoma |
| DLBC | Lymphoid Neoplasm Diffuse Large |
| | B-cell Lymphoma |
| MESO | Mesothelioma |
| MISC | Miscellaneous |
| OV | Ovarian serous cystadenocarcinoma |
| PAAD | Pancreatic adenocarcinoma |
| PCPG | Pheochromocytoma and Paraganglioma |
| PRAD | Prostate adenocarcinoma |
| READ | Rectum adenocarcinoma |
| SARC | Sarcoma |
| SKCM | Skin Cutaneous Melanoma |
| STAD | Stomach adenocarcinoma |
| TGCT | Testicular Germ Cell Tumors |
| THYM | Thymoma |
| THCA | Thyroid carcinoma |
| UCS | Uterine Carcinosarcoma |
| UCEC | Uterine Corpus Endometrial Carcinoma |
| UVM | Uveal Melanoma |

TABLE 2
Inflammasome signature.

| | | Enzyme Commission |
|---|---|---|
| Gene name | Synonyms | Number (EC) |
| CASP1 | IL1BC, IL1BCE | 3.4.22.36 |
| CASP4 | ICH2 | 3.4.22.57 |
| CASP5 | ICH3 | 3.4.22.58 |
| PYCARD | ASC, CARDS, TMS1 | |
| GSDMD | DFNA5L, GSDMDC1, | |
| | FKSG10 | |

### Example 2: IL-18BP is a Soluble Immune Checkpoint—RNA Expression Data

### Upregulation of IL-18BP in the TME-TCGA vs GTEX

[0727] FIG. 47: expression of IL18BP transcripts in normal (green) or cancer (red) tissues from the TCGA and GTEX databases. GBM, glioblastoma multiforme; HSNC, head and neck squamous carcinoma; KIRC, kidney renal clear cell carcinoma; PAAD, pancreatic adenocarcinoma; SKCM, skin cutaneous melanoma; STAD, stomach adenocarcinoma (*P<0.01).

### IL-18BP is Expressed in Suppressive Myeloid Populations and Correlate to PD-L1 in the TME Suggesting Resistance Mechanism

[0728] As shown in FIG. 59A: IL-18BP correlates with PD-L1 at RNA level (TCGA) in colon and breast cancers suggesting a resistance mechanism to immune activation in the tumor microenvironment (TME).

[0729] As shown in FIG. 59B and FIG. 48: Single-cell RNA analyses of tumor-infiltrating myeloid cells, including tumor associated macrophages (TAMs) and dendritic cells (DCs) in colon cancer patients showing that IL-18BP is up-regulated in myeloid population in the TME compared to the periphery (PBMCs), suggesting a resistance mechanism to immune activation in the TME.

[0730] As shown in FIG. 59C: Single-cell RNA analyses of tumor-infiltrating myeloid cells, including tumor associated macrophages (TAMs) and dendritic cells (DCs) across indications showing that IL-18BP is up-regulated in myeloid population in the TME compared to the periphery (PBMCs), suggesting a resistance mechanism to immune activation in the TME.

Upregulation of IL-18BP in Response to ICB Treatment—scRNA/Bulk RNA Data

[0731] FIG. 60A-C: IL-18BP is upregulated (RNA level) following immune checkpoint blockage (ICB) treatment IL-18BP levels are upregulated in the tumor microenvironment (RNA) following treatment with anti-PD-1 (breast and basal cell carcinoma) or anti-PD-1 plus anti CTLA-4 (melanoma) suggesting a potential resistance mechanism.

[0732] FIG. 60D: IL-18BP is elevated in NSCLC patient serum post aPD-(L)1 treatment Quantification of plasma IL-18BP protein level by ELISA for healthy donors (n=22) and patients with NSCLC (n=52) at baseline before treatment and at the time of the following CT scan after receiving treatment with anti-PD-(L)1 (n=52).

Association of IL-18BP Levels with Poor Response to aPD-(L)1 Blockage: 1) RCC (Combo of Pembro+Lenvatinib) and 2) IL18BP in Melanoma Responders/NR (Olink)

[0733] A supportive data for the role of IL-18BP as a soluble ICP and a potential resistance mechanism to PD1 blockage in Renal Cell Carcinoma patients receiving Pembrolizumab plus Lenvatinib. As can be seen in FIG. 61A: High IL-18BP in patient serum pre-treated with Pembrolizumab plus Lenvatinib is associated with shorter progression free survival (PFS). As can be seen in FIG. 61B: High IL-18BP in patient serum is pre-treated with Pembrolizumab plus Lenvatinib associated with stable or progressive disease (SD/PD).

[0734] A supportive data for the role of IL-18BP as a soluble ICP and a potential resistance mechanism to PD1 blockage in melanoma cancer patients receiving anti PD-1 treatment. As can be seen in FIG. 62, high IL-18BP in serum of melanoma cancer patients pre-treated with anti PD-1 is associated with poor response. Raw Olink data (NPX format) Student's T-test was performed for IL18BP protein after intensity normalization for Target products.

### Example 3: Inflammasome Induced Cytokines Such as IL-18 and IL-1B are Abundant in the TME

[0735] Unlike other cytokines, inflammasome induced cytokines such as IL-18 and IL-1b are abundant in the TME.

### Methods:

[0736] Tumor were cut into small pieces with a scalpel and transferred to GentleMACs™ C tubes (Miltenyi Biotec) containing an enzyme mix using human tumor Dissociation Kit (Miltenyi Biotec), as per the manufacturer's protocol. After dissociation, samples were centrifuged at 300 g for 5 minutes and supernatants were collected and recentrifuged at 3130 g for 10 minutes. Following centrifugation, supernatants were recollected and distributed in aliquots for storage at −80° C. At the day of the assay, samples were thawed at room temperature and subsequently centrifuged at 14,000 RPM for 10 min and supernatants were collected for immediate usage in ELISAs or CBA with the following kits:
[0737] Human IL18 ELISA kit (MBL,7620)
[0738] Human Th1/Th2/Th17 cytokine Cytometric Bead Array (CBA) (BD 560484)

[0739] Human Inflammatory Cytokine Cytometric Bead Array (CBA) (BD 551811).

### Results:

[0740] FIG. 71A: IL-18 and IL-1b are inflammasome derived cytokines with opposite effects in the TME. While IL-18 promotes T and NK cell activation and lead to anti tumorigenic activity, IL1b has a dual role and in sum of effects lead to pro-tumorigenic activity.

[0741] FIG. 71B: Dot plot graph shows levels of cytokines in tumor derived supernatants measured across various indications. Each dot represents one sample. The mean is depicted by the short black lines. All other cytokines beside IL-1b and IL-18 were below the lower limit of detection.

### Example 4: IL18 and IL18BP Protein Level in Patient's Serum Compared with Healthy Donors and Across Indications

### Methods:

[0742] Serum samples from healthy donors and cancer patients were thawed and levels of IL18 analytes (IL18 total, IL18BP) were measured by the following ELISA KITS according to manufacturer's protocol:
[0743] Human IL18 ELISA kit (MBL,7620)
[0744] Human IL18BP ELISA Kit (R&D DBP180)

### Results:

[0745] FIG. 56A. IL18 analytes levels in patient's serum across indication. FIG. 56B. Dot plot representing IL18 analytes in serum samples from an individual patient or healthy donor. Statistical analysis was preformed using t test (two tailed), P<0.001***. Expression of IL-18 is significantly increased in serum of cancer patients compared with healthy donors, confirming that IL-18 levels are enhanced in the periphery during malignancy.

### Example 5: Higher Level of IL-18 Protein in Serum of Head &Neck Cancer Patients with Tumor's Site in the Tongue

### Methods:

[0746] Serum samples from Head and Neck cancer patients were thawed and levels of IL18 analytes were measure by the following ELISA KITS according to manufacturer's protocol: Human IL18 ELISA kit (MBL,7620) and Human IL18BP ELISA Kit (R&D DBP180).

### Results:

[0747] FIG. 63A-63B: Principal Component Analysis (PCA) shows that mainly tumor's sites separate between samples with high levels of IL-18 Vs. low levels. Location of tumor in tongue correlates with high levels of IL-18 and lower levels of IL18BP compared with other sites.

[0748] FIG. 63C. Individual patient's serum levels for IL-18 and IL18BP are shown in dot plots in different tumor's sites.

### Example 6: Levels of IL18BP and IL18 Proteins in the Plasma of NSCLC Patients Treated with Anti-PD1/Anti-PD1 Plus Chemo

### Methods:

[0749] Plasma samples of NSCLC patients were thawed and levels of IL18 and IL18BP were measured by the following ELISA kits according to manufacturer's protocol: Human IL18 ELISA kit (MBL,7620) and Human IL18BP ELISA Kit (R&D DBP180).

### Results:

[0750] FIG. 65: Plasma of NSCLC patients was collected at baseline and following single dose of anti-PD-1 (Keytruda) (n=8) or following single dose of chemotherapy+ anti-PD-1 (n=14). Clinical assessment of patient's response (responding/non-responding, R/NR) was performed following PET-CT scan after several treatment cycles.

[0751] Average plasma levels of IL18BP and IL18 as measured at baseline, were higher in patients responding to therapies (anti-PD-1 monotherapy or combination of anti-PD-1 and chemotherapy) compared to non-responding patients (FIG. 65A).

[0752] As shown in FIGS. 65B and 65D, patients clinically non-responding to anti-PD-1 monotherapy showed higher plasma levels of IL18 and IL18BP compared to baseline levels, whereas IL18 and IL18BP levels did not significantly change from baseline in patients responding to anti-PD-1 monotherapy. In contrast, only patients clinically responding to a combination of anti-PD-1+ chemotherapy showed higher levels of IL18 and IL18BP compared with baseline (FIG. 65C, 65D).

### Discussion:

[0753] NSCLC patients treated with anti-PD1 (Keytruda) most likely express PDL1-CPS >50%, which potentially points to increased immune infiltrate and subsequent increased IFNg expression in the TME. Given that IL18BP is an IFNg-induced gene, this could suggest on a potential immune resistance mechanism in patients treated with anti-PD-1 and support the rational for a combined anti-IL18BP and anti-PD1 blockade to further increase patient's potential anti-tumor responses. Patients receiving combined treatment of chemotherapy+ anti-PD-1, are PDL1-CPS <50%, and tend to have greater tumor masses. Patients responding clinically to anti-PD-1+ chemotherapy combination, may have a potential increase in infiltration of immune cells which may secrete IL18, and a subsequent induction in IFNg levels which may potentially result in increase of IL18BP secretion. The clinical anti-tumor responses in these patients could be potentiated with anti-IL18BP antibodies.

### Example 7: IL18 and IL18BP Protein Levels in Tumor Derived Supernatants (TDS)

### Methods:

[0754] Tumor were cut into small pieces with a scalpel and transferred to GentleMACs™ C tubes (Miltenyi Biotec) containing an enzyme mix using human tumor Dissociation Kit (Miltenyi Biotec), as per the manufacturer's protocol. After dissociation, samples were centrifuged at 300 g for 5 minutes and supernatants were collected and recentrifuged at 3130 g for 10 minutes. Following centrifugation, supernatants were recollected and distributed in aliquots for storage at −80° C. At the day of the assay, samples were thawed at room temperature and subsequently centrifuged at 14,000 RPM for 10 min and supernatants were collected for immediate usage in ELISAs with the following kits:
[0755] Human IL18 ELISA kit (MBL,7620)
[0756] Human IL18BP ELISA Kit (R&D DBP180)

### Results:

[0757] IL-18 and IL-18BP were detected in TDS across various indications.

[0758] FIG. 57. Dot plot representing IL18 and IL18BP in TDS samples from individual patients. FIG. 58. IL18 and IL18BP levels in patient's TDS across indication.

### Example 8: IL18RA is Expressed on TILS in the TME and its Expression is Induced on CD4 Tils Compared with Periphery

### Methods:

[0759] Tumor samples were cut into small pieces with a scalpel and transferred to GentleMACs™ C tubes (Miltenyi Biotec) containing an enzyme mix. After dissociation, cells were filtered through a 70 m filter. Single-cell suspensions were seed into a 96-well V-bottomed plate and a cocktail of antibodies (Abs) to CD16 (BioLegend), CD32 (Thermo Fisher), and CD64 (BioLegend) were used to block Fc receptors. Immune populations were stained with anti-human IL18Ra or using its isotype control (BioLegend. After wash (1% BSA, 0.1% sodium azide, in PBS), cells were acquired on FACS Fortessa cytometer (BD Bioscience). Analysis was done using FlowJo.

### Results:

[0760] IL-18Ra expression is induced on tumor infiltrating T cells compared with matched PBMCs, with a statistical significance on CD4+ T cells, and a trend on CD8+ T cells.

[0761] FIG. 55A. Expression of IL18Ra on CD8+ and CD4+ and NK TILs from dissociated human tumors of various cancer types is shown. Each dot represents a distinct tumor from an individual patient. Fold expression value was calculated by dividing the MFI of a target by the MFI of the relevant isotype control. (FOI). Average and SEM is shown by the ticks. FIG. 55B, Expression of IL18Ra on CD4+ and CD8+ T and NK cells from donor-matched PBMCs and TME. Statistical analysis was preformed using paired t test (two tailed), P<0.05; **p=0.0064.

### Example 9: Co-Expression of TIGIT and IL18RA within the TME

[0762] Tumor samples were mechanically disassociated and enzymatically digested using Milteny's human tumor disassociation kit (according to manufacturer's instructions). Single-cell suspensions were stained with Zombie-Nir to exclude dead cells and stained with the antibodies against CD45, CD3, CD4, CD8, CD56, TIGIT or IL18Ra. Cells were acquired on FACS Fortessa cytometer (BD Bioscience) and analyzed with FlowJo software (V10). Cell surface markers were used to detect the following immune populations: CD8 (CD3+CD8+), CD4 (CD3+CD4+), NK (CD3-CD56+) and NKT (CD3+CD56+).

[0763] The results are shown in FIG. 33, presenting Flow cytometry dot plots showing co-expression of IL18Ra and TIGIT in the endometrium and colon TME, on CD8 T cells, CD4 T cells, NKs, and NKT cells. The co-expression of TIGIT and IL18Ra on same cells indicates that targeting both pathways by combined administration of inhibitory anti-IL18BP and anti-TIGIT antibodies might have a beneficial effect.

### Example 10: Generation and Characterization of Custom Abs Against Human IL18-Bp Protein by Adimab Ltd

Generation of Anti IL18-BP hIgG1-N297A Abs Against Human IL18-BP Protein

### Antigen Preparation

[0764] Antigens were biotinylated using the EZ-Link Sulfo-NHS-Biotinylation Kit (Thermo Scientific, Cat #21425).

[0765] The antigens were concentrated to ˜1 mg/mL and buffer exchanged into PBS before addition of 1:7.5 molar ratio biotinylation reagent. The mixture was held at 4C overnight prior to another buffer exchange to remove free biotin in the solution. Biotinylation was confirmed through streptavidin sensor binding of the labeled proteins on a ForteBio.

### Naïve Library Selections

[0766] Eight naïve human synthetic yeast libraries each of ˜10⁹ diversity were propagated as previously described (see, e.g., Y. Xu et al., PEDS 26(10), 663-70 (2013); WO2009036379; WO2010105256; and WO2012009568.)

[0767] For the first two rounds of selection, a magnetic bead sorting technique utilizing the Miltenyi MACS system was performed, as previously described (see, e.g., Siegel et al., J Immunol Methods 286(1-2), 141-153 (2004).) Briefly, yeast cells (˜10¹⁰ cells/library) were incubated with 10 nM biotinylated human IL18-BP-Fc fusion for 30 min at 30° C. in wash buffer (phosphate-buffered saline (PBS)/0.1% bovine serum albumin (BSA)). After washing once with 40 mL ice-cold wash buffer, the cell pellet was resuspended in 20 mL wash buffer, and Streptavidin MicroBeads (500 l) were added to the yeast and incubated for 15 min at 4° C. Next the yeast were pelleted, resuspended in 5 mL wash buffer, and loaded onto a Miltenyi LS column. After the 5 mL were loaded, the column was washed 3 times with 3 mL wash buffer. The column was then removed from the magnetic field, and the yeast were eluted with 5 mL of growth media and then grown overnight.

[0768] The following rounds of selection were performed using flow cytometry (FACS). Yeast were pelleted, washed three times with wash buffer, and incubated at 30° C. with either 10 nM biotinylated human IL18-BP-Fc fusion, 10 nM biotinylated cyno IL18-BP-Fc fusion, 100 nM human IL18-BP-Fc monomer, 100 nM biotinylated cyno IL18-BP monomer, or with a polyspecificity reagent (PSR) to remove non-specific antibodies from the selection. Some selections were also performed to enrich for IL18 competitive antibodies by incubating with biotinylated human IL18-BP-Fc fusion precomplexed to human IL18. For the PSR depletion, the libraries were incubated with a 1:10 dilution of biotinylated PSR reagent as previously described (see, e.g., Y. Xu et al, PEDS 26(10), 663-70 (2013).) Yeast were then washed twice with wash buffer and stained with goat F(ab′)2 anti-human kappa-FITC (LC-FITC) diluted 1:100 (Southern Biotech, Cat #2062-02) and either Streptavidin-AF633 (SA-633) diluted 1:500 (Life Technologies, Cat #S21375) or Extravidin-phycoerythrin (EA-PE) diluted 1:50 (Sigma-Aldrich, Cat #E4011), secondary reagents for 15 min at 4° C. After washing twice with ice-cold wash buffer, the cell pellets were resuspended in 0.3 mL wash buffer and transferred to strainer-capped sort tubes. Sorting was performed using a FACS ARIA sorter (BD Biosciences) and sort gates were determined to select for antibodies with desired characteristics. Selection rounds were repeated until a population with all of the desired characteristics was obtained. After the final round of sorting, yeast were plated and individual colonies were picked for characterization.

### Antibody Optimization

[0769] Optimization of antibodies was performed via a light chain batch shuffle, and then by introducing diversities into the heavy chain and light chain variable regions as described below. A combination of some of these approaches was used for each antibody.

[0770] Light chain batch shuffle: Heavy chains from the naïve output were used to prepare light chain diversification libraries. Selections were performed on these libraries as described above, i.e., with one round of MACS and four rounds of FACS. In the different FACS selection rounds, the libraries were evaluated for, e.g., PSR binding and affinity pressure by antigen titration. Sorting was performed in order to obtain a population with the desired characteristics. Individual colonies from each terminal FACS selection round were picked for sequencing and characterization.

[0771] CDRH1 and CDRH2 selection: The CDRH3 of a single antibody was recombined into a premade library with CDRH1 and CDRH2 variants of a diversity of ˜10⁸ and selections were performed with one round of MACS and four rounds of FACS as described in the naïve selections. For each FACS round the libraries were looked at for PSR binding and affinity pressure, and sorting was performed in order to obtain a population with the desired characteristics.

[0772] CDRH3 and CDRL3 selection: Oligos were ordered from IDT which comprised the CDRH3 and the CDRL3 as well as a flanking region on either side of the CDR3. Each oligo variegated one or two amino acids in the CDR3 via NNK diversity. The CDRH3 oligos were recombined with heavy chain FR1-FR3 variable regions containing selected variants from the CDRH1 and CDRH2 selections, and the CDRL3 oligos were recombined with the light chain FR1-FR3 variable regions from the parental antibody, for a combined library diversity of ˜10⁸. Selections were performed with one round of MACS and four rounds of FACS as described in the naïve selections. For each FACS round the libraries were looked at for PSR binding and affinity pressure, and sorting was performed in order to obtain a population with the desired characteristics. For these selections affinity pressures were applied by preincubating the antigen with parental IgG for 30 minutes and then applying that precomplexed mixture to the yeast library for a length of time which would allow the selection to reach an equilibrium. The higher affinity antibodies were then able to be sorted.

### Antibody Production and Purification

[0773] Yeast clones were grown to saturation and then induced for 48 h at 30° C. with shaking. After induction, yeast cells were pelleted, and the supernatants were harvested for purification. IgGs were purified using a Protein A column and eluted with acetic acid, pH 3.5.

### Size Exclusion Chromatography

[0774] A TSKgel SuperSW mAb HTP column (22855) was used for fast SEC analysis of mammalian produced mAbs at 0.4 mL/min with a cycle time of 6 min/run. 200 mM Sodium Phosphate and 250 mM Sodium Chloride was used as the mobile phase.

### Dynamic Scanning Fluorimetry

[0775] 10 μL of 20× Sypro Orange is added to 20 μL of 0.2-1 mg/mL mAb or Fab solution. A RT-PCR instrument (BioRad CFX96 RT PCR) is used to ramp the sample plate temperature from 40 to 95° C. at 0.5° C. increment, with 2 min equilibrate at each temperature. The negative of first derivative for the raw data is used to extract Tm.

TABLE 3
Summary of SEC-HPLC (%) and Fab Tm
by DSF (° C.) for optimized antibodies.

| | Fab Tm | SEC-HPLC, |
|---|---|---|
| Clone | (DSF, ° C.) | % monomer |
| ADI-71663 | 68.0 | 93.9 |
| ADI-71701 | 71.5 | 98.6 |
| ADI-71707 | 71.0 | 98.8 |
| ADI-71709 | 71.5 | 97.6 |
| ADI-71710 | 71.5 | 97.9 |
| ADI-71719 | 72.5 | 94.5 |
| ADI-71720 | 72.5 | 98.6 |
| ADI-71722 | 73.0 | 95.9 |
| ADI-71728 | 73.0 | 95.0 |
| ADI-71736 | 73.5 | 79.2 |
| ADI-71739 | 73.0 | 94.9 |
| ADI-71741 | 73.5 | 99.4 |
| ADI-71742 | 74.0 | 91.3 |
| ADI-71744 | 74.5 | 88.1 |
| ADI-71753 | 74.5 | 96.9 |
| ADI-71755 | 74.5 | 92.9 |

Anti IL18-BP hIgG1 Abs Analysis Included the Following Steps:

### Affinity Measurements of Anti-Human Abs to Human IL18-BP-Fc Protein and Cynomolgus Monkey IL18-BP-Fc Protein by ForteBio Octet—Naïve Output

[0776] Octet affinity measurements were performed on an Octet HTX generally as previously described (see, e.g., Estep et al., Mabs 5(2), 270-278 (2013)). Briefly, ForteBio affinity measurements were performed by loading IgGs on-line onto AHC sensors. Sensors were equilibrated off-line in assay buffer for 30 min and then monitored on-line for 60 seconds for baseline establishment. Sensors with loaded IgGs were exposed to 100 nM antigen for 3 minutes, and afterwards were transferred to assay buffer for 3 min for off-rate measurement. All kinetics were analyzed using the 1:1 binding model.

### SPR Measurements

### Surface Plasmon Resonance K_{D} Measurements

[0777] Kinetic analysis was conducted at 25° C. in a HBS-EP+ running buffer system (10 mM HEPES pH 7.4, 150 mM NaCl, 3 mM EDTA, 0.05% Surfactant P20) using a Biacore 8K optical biosensor (Global Life Sciences Solutions USA, Marlborough, MA). The sample compartment was maintained at 10° C. for the duration of each experiment.

[0778] For antibody capture experiments, a goat anti-human Fc antibody (Jackson ImmunoResearch) was covalently coupled to flow cells 1 and 2 of a CM5 sensor chip surface via standard amine coupling (1:1 EDC:NHS) and then blocked with ethanolamine (1.0 M, pH 8.5). The antibodies (10.0 nM in running buffer) were injected (40 s at 10 μL/min) over flow cell 2. A series of concentrations of IL18-BP-Fc monomer ranging from 27.0 to 0.111 nM (3-fold dilutions in running buffer) were injected (300 s at 30 μL/min) over flow cells 1 and 2. Dissociation of IL18-BP-Fc monomer was monitored for 600 s or 5130 s. Several blank buffer samples were injected (300 s at 30 μL/min) over flow cells 1 and 2 and used for reference surface subtraction. All surfaces (flow cells 1 and 2) were regenerated via two injections (20 s at 30 μL/min) of 10 mM glycine, pH 1.5.

[0779] For biotinylated antigen capture-Fab or full Ab in solution experiments, each experiment cycle began with an injection (150 s at 2 μL/min) over flow cells 1 and 2 of a 1:20 solution of biotin CAPture reagent (Global Life Sciences Solutions USA) in running buffer. This was followed by an injection (120 s at 1.0 μL/min) of biotinylated IL18-BP-Fc fusion (10.0 nM) over flow cell 2. Upon capture of biotinylated IL18-BP-Fc fusion to the sensor surface, a series of Fab concentrations (24.3-0.1 nM, 3-fold dilution) of full Ab concentration (12.5 nM-0.8 nM, 2 fold dilution) was injected (300 s at 30 μL/min) over flow cells 1 and 2. The dissociation of the Fabs or Abs were monitored for 600 s or 5130 s. Several blank buffer samples were injected (300 s at 30 μL/min) over flow cells 1 and 2 and used for reference surface subtraction. Finally, an injection (120 s at 10 μL/min) of regeneration solution (6 M Guanidine-HCl in 0.25 M NaOH) over flow cells 1 and 2 prepared the sensor surface for another cycle.

[0780] For data processing and fitting, the sensorgrams were cropped to include only the association and dissociation steps. This cropped data was subsequently aligned, double reference subtracted, and then non-linear least squares fit to a 1:1 binding model using Biacore Insight Evaluation software version 3.0.11.15423.

[0781] The results are shown in FIGS. 41 and 42.

[0782] FIG. 41A: Biacore image of the anti-IL18BP Fab-human IL18BP interactions; 10 min dissociation.

[0783] FIG. 41B: Biacore image of the anti-IL18BP Fab-human IL18BP interactions; 85 min dissociation.

[0784] FIG. 41C: Biacore image of the anti-IL18BP Fab-cyno IL18BP interactions, 10 min dissociation.

[0785] FIG. 41D: Biacore image of the anti-IL18BP Fab-cyno IL18BP interactions, 85 min dissociation.

[0786] FIG. 42 presents a Table, showing KD values for human/cyno anti-IL18BP Fab-IL18BP interactions measured by Biacore.

### MSD-SET K_{D} Measurements

[0787] Equilibrium affinity measurements performed as previously described (Estep et al., 2013). Solution equilibrium titrations (SET) were performed in PBS+0.1% IgG-Free BSA (PBSF) with antigen (biotinylated IL18-BP-Fc fusion) held constant at 50 pM and incubated with 1.5- to 3-fold serial dilutions of Fab starting at 10 nM to 500 pM (experimental condition is sample dependent). Antibodies (20 nM in PBS) were coated onto standard bind MSD-ECL plates overnight at 4° C. or at room temperature for 30 min. Plates were then blocked by BSA for 30 min with shaking at 700 rpm, followed by a wash with wash buffer (PBSF+0.05% Tween 20). SET samples were applied and incubated on the plates for 150 sec with shaking at 700 rpm followed by one wash. Antigen captured on a plate was detected with 1000 ng/mL sulfotag-labeled streptavidin in PBSF by incubation on the plate for 3 min. The plates were washed once with wash buffer and then read on the MSD Meso Sector S 600 instrument using 1× Read Buffer T with surfactant. The percent free antigen was plotted as a function of titrated antibody in Prism and fit to a quadratic equation to extract the K_{D}.

[0788] The results are shown in FIGS. 43-45.

[0789] FIG. 43A: Overlay of the Fab-IL18BP MSD Image (in Black) with the Human IL-18-IL18BP MSD Image (in Green).

[0790] FIG. 43B: Overlay of the Fab-IL18BP MSD Image (in Black) with the Cyno IL-18-IL18BP MSD Image (in Green).

[0791] FIG. 44 presents a Table, showing K_{D} values for human/cyno anti-IL18BP Fab-IL18BP interactions measured by MSD.

[0792] FIG. 45 presents a Table, showing K_{D} values for human/cyno IL18-IL18BP interactions measured by MSD.

### ForteBio Octet Epitope Binning

[0793] Epitope binning was performed using a standard sandwich format cross-blocking assay. Control anti-target IgG was loaded onto AHQ sensors and unoccupied Fc-binding sites on the sensor were blocked with an irrelevant human IgG1 antibody. The sensors were then exposed to 100 nM human IL18-BP-Fc antigen followed by a second anti-IL18-BP antibody. Additional binding by the second antibody after antigen association indicates an unoccupied epitope (non-competitor), while no binding indicates epitope blocking (competitor).

### AlphaLISA Competition Assay

[0794] Anti-HIS tag acceptor beads (Perkin Elmer AL178C) were incubated with 2.5 nM human or cyno IL18-BP His, along with 2.5 nM biotinylated human or cyno IL18 and 150 nM IgG for 60 mins. Following this incubation Steptavidin donor beads (Perkin Elmer 6760002S) were added and incubated for an additional 30 mins at room temperature. The samples are then read using a Perkin Elmer EnSpire Alpha Multimode Plate Reader (Perkin Elmer 2390). The samples are read at 615 nm after an excitation at 680 nm. Competition is calculated using Photon (PBSF only)/Photon (Antibody) ratio. For top binders, assay was repeated using antibody dose-titration (150 nM, 3-fold dilution).

### Affinity Measurements of Anti-Human IL18-BP Abs to Human IL18-BP Monomeric Protein and Cynomolgus Monkey IL18-BP-HIS Tag Protein by BiaCORE—Optimized Output

[0795] For biotinylated antigen capture-Fab in solution experiments, each experiment cycle began with an injection (150 s at 2 μL/min) over flow cells 1 and 2 of a 1:20 solution of biotin CAPture reagent (Global Life Sciences Solutions USA) in running buffer. This was followed by an injection (120 s at 1.0 μL/min) of biotinylated IL18-BP-Fc fusion (10.0 nM) over flow cell 2. Upon capture of biotinylated IL18-BP-Fc fusion to the sensor surface, a series of Fab concentrations (24.3-0.1 nM, 3-fold dilution) was injected (300 s at 30 μL/min) over flow cells 1 and 2. The dissociation of the Fabs were monitored for 600 s or 5130 s. Several blank buffer samples were injected (300 s at 30 μL/min) over flow cells 1 and 2 and used for reference surface subtraction. Finally, an injection (120 s at 10 μL/min) of regeneration solution (6 M Guanidine-HCl in 0.25 M NaOH) over flow cells 1 and 2 prepared the sensor surface for another cycle.

[0796] For data processing and fitting, the sensorgrams were cropped to include only the association and dissociation steps. This cropped data was subsequently aligned, double reference subtracted, and then non-linear least squares fit to a 1:1 binding model using Biacore Insight Evaluation software version 3.0.11.15423.

### Blocking of Human IL18: IL18-BP Interaction by ELISA

[0797] Anti-human IL18-BP Abs from Adimab were tested for inhibition of human IL18-BP-Fc fusion protein binding to IL-18 (R&D) by ELISA. Human anti-IL18-BP polyclonal antibody (R&D, cat. AF 119) was coated on the wells of a high binding plate overnight at 4° C. (2.5 μg/ml, 50 μl/well volume). Coated plate was rinsed once with PBS and incubated with 250 μL blocking buffer (2.5% skim milk in PBS) for 2 hr in room temperature (RT). Serial dilutions of anti-human IL18-BP Abs (1:2, 4-0.06 μg/ml, 50 μL/well) mixed with 1 nM human IL18-BP-Fc and 4 nM biotinylated human IL18 at RT were pre-incubated for 1 h at RT. Blocking buffer was removed and plate was washed and, incubated with 100 μl/well protein mix for 2 h at RT. Plate was washed and incubated with streptavidin-HRP solution (Jackson; 50 μL/well volume) at RT for 1 h. Plate was washed 3 times with PBS-T, once with PBS, and incubated with TMB substrate solution (50 μL/well) at RT to allow signal development. The HRP reaction was stopped by addition of 1N HCl solution (50 μL/well), and absorbance signal was read at 450 nm on a luminescence Reader (EnSpire, Perkin Elmar). Data were exported to Excel (Microsoft) and plotted in GraphPad Prism (GraphPad Software, Inc.). Blocking was calculated as a decrease in the binding signal of biotinylated human IL-18 to IL18-BP-Fc protein in the presence of an Ab compared to the binding signal in the presence of an isotype control.

Rescue of Free Human IL18 from Pre-Complexed Human Serum and Recombinant Human IL18 by ELISA

[0798] Anti-human IL18-BP Abs from Adimab were tested for rescue of human recombinant IL18 pre-bound by human IL18-BP in human serum by ELISA. Human anti-IL18 Mab (MOR09464_N30K antibody Novartis patent US 2014/0112915 A1) was coated on the wells of a high binding plate overnight at 4° C. (2.5 μg/ml, 50 μl/well volume). Coated plate was rinsed once with PBS and incubated with 250 μL blocking buffer (2.5% skim milk in PBS) for 2 hr in room temperature (RT). Serial dilutions of anti-human IL18-BP Abs (1:2, 5-0.078 μg/ml, 50 μL/well) were mixed and incubated for 2 hrs at 37° C. with human healthy donor serum (ISERS50 Almog) spiked with 4 ng/ml of recombinant human IL18 (R&D) for 1 hr at RT. For standard curve, serial dilutions of recombinant IL18 in blocking buffer were made (1:2, 3-0.05 ng/ml). Blocking buffer was removed and plate was washed and, incubated with 100 μl/well protein mix for 2 hrs at RT. Plate was washed and incubated with D045-6-biotin (1:1000 in 1% BSA PBS, 100 μl/well, R&D) at RT for 1 hr. Plate was washed and incubated streptavidin-HRP solution (Jackson; 50 μL/well volume) at RT for 1 hr. Plate was washed 3 times with PBS-T, once with PBS, and incubated with TMB substrate solution (50 μL/well) at RT to allow signal development. The HRP reaction was stopped by addition of 1N HCl solution (50 μL/well), and absorbance signal was read at 450 nm on a luminescence Reader (EnSpire, Perkin Elmar). Data were exported to Excel (Microsoft) and plotted in GraphPad Prism (GraphPad Software, Inc.). % IL18 rescue was calculated as an addition of free IL18 detected over total IL18: IL18-BP complex amount in the presence of an Ab compared to the binding signal in the presence of an isotype control.

Rescue of Free Cyno Recombinant IL18 from Pre-Complexed Cyno Recombinant IL18-BP with Recombinant Cyno IL18 by ELISA

[0799] Anti-human IL18-BP Abs from Adimab were tested for rescue of cyno recombinant IL18 pre-bound by cyno recombinant IL18-BP by ELISA. Human anti-IL18 Mab (MOR09464_N30K antibody Novartis patent US 2014/0112915 A1) was coated on the wells of a high binding plate overnight at 4° C. (2.5 μg/ml, 50 μl/well volume). Coated plate was rinsed once with PBS and incubated with 250 μL blocking buffer (2.5% skim milk in PBS) for 2 hrs in room temperature (RT). Blocking buffer was removed and plate was washed and, incubated for 1 hr at 37° C. with 100 μl/well of serial dilutions of anti-human IL18-BP Abs (1:3, 10-0.004 μg/ml, 50 μL/well) mixed with pre-formed cyno IL18:IL18-BP complex (1 ng/ml rhesus IL18, R&D and 25 ng/ml IL18BP-His, R&D; incubated 1 hr at 37° C.). Plate was washed and incubated with D045-6-biotin (1:2000 in 1% BSA PBS, 100 μl/well, R&D) at RT for 1 h. Plate was washed and incubated streptavidin-HRP solution (Jackson; 50 μL/well volume) at RT for 1 h. Plate was washed 3 times with PBS-T, once with PBS, and incubated with TMB substrate solution (50 μL/well) at RT to allow signal development. The HRP reaction was stopped by addition of 1N HCl solution (50 μL/well), and absorbance signal was read at 450 nm on a luminescence Reader (EnSpire, Perkin Elmar). Data were exported to Excel (Microsoft) and plotted in GraphPad Prism (GraphPad Software, Inc.). % IL18 rescue was calculated as an addition of free IL18 detected over total IL18:IL18-BP complex amount in the presence of an Ab compared to the binding signal in the presence of an isotype control.

Rescue of Free Human IL18 from Pre-Complexed Human IL18-IL18-BP by IL18 HEK293 Reporter Cells

[0800] 0.1 ng/ml human IL18 (R&D) was pre-incubated with cell medium express high levels of IL18-BP from SUIT2 INF-gamma treated cell (24 hrs, 1000 U/ml) in the presence of 3 μg/ml of Adimab Abs or isotype control. 50K/well of HEK293 reporter cells (Invivogen) were seeded in 96 well plate in Test medium (DMEM high glucose, 10% FBS, 1% pen-strep, 1% glutamax) and 20 μl of sample was added to each well. Cells were incubated for 20 hrs at 37° C. CO₂ incubator. Next day, 20 μl induced cells supernatant were added to 180 μl prewarmed Quanti-Blue solution (Invivogen) in 96 well plate. Cells were incubated at 37° C. for 1 hour and SEAP levels were measured by OD650 reading. All samples were measured in duplicates. Blocking was calculated as an increase of the free IL18 detection in the presence of an Ab compared to the free IL18 levels in the presence of an isotype control.

### Results:

Anti-Human IL18-BP hIgG1 Generation

[0801] The yeast naïve libraries at Adimab were used in 5 rounds of selection using human IL18-BP fused to hIgG1 Fc protein or cynomolgus monkey IL18-BP-Fc protein (Adimab) and one round of counter selection against poly-specificity reagent for depletion of non-specific antibodies. Human IL18 was added on top of human IL18-BP antigen is several rounds to enrich for blocking antibodies.

[0802] In the first screen, 740 clones were isolated, sequenced and screened for binding to human IL18-BP in Kd ranking using Bio-Layer Interferometry (BLI) technology on a label-free, dip-and-read biosensor platform (ForteBio Octet® RED384) Octet instrument. Out of 740 clones, 341 were unique and identified as positive binders to human IL18-BP, 266 antibodies had the affinity below 100 nM to human monomeric IL18BP. A secondary screen of top 341 Octet-positive antibodies included affinity measurements to cynomolgus monkey IL18-BP fused to hIgG1 Fc or to cynomolgus monkey IL18-BP-HIS and to human IL18-BP monomeric protein. 195 antibodies were human/cyno cross-reactive. Initial antibody binning was performed using sandwich approach in Octet instrument; however, the assay could not discriminate between likely IL18-competitors and non-competitors. To overcome this, binning of the antibodies was performed using ligand competition in FACS. Individual clones were tested in the presence of 10 nM Hu IL18BP Fc with or without 100 nM IL18. All clones picked show competition with the IL18 for the binding to IL18BP (Antibodies represent only bin 1 and all are ligand competitive).

[0803] Next, variable heavy region from 341 unique clones from the naïve selection were subcloned into pre-made light chain shuffled library. Selection of LCBS libraries were performed as described above, with 3 rounds of selection using either human or cynomolgus monkey IL18-BP antigen and one round of counter selection using PSR.

[0804] In the first screen, 1152 clones were isolated, sequenced and screened for binding to human IL18-BP in KD ranking using Bio-Layer Interferometry (BLI) technology on a label-free, dip-and-read biosensor platform (ForteBio Octet® RED384) Octet instrument. Out of 1152 clones, 658 were unique and identified as positive binders to human IL18-BP. Antibodies were ranked based on binding affinity to human IL18-BP-Fc protein and top 87 clones were picked for further characterization and purified from the medium of the yeast expressing cells using affinity column. A secondary screen of top 87 Octet-positive antibodies included affinity measurements to cynomolgus monkey IL18-BP fused to hIgG1 Fc or to cynomolgus monkey IL18-BP-HIS and to human IL18-BP monomeric protein. Antibodies were binned according to IL18-BP-Fc binding and competition with human IL18. Competition for the binding of IL18-BP-Fc was performed in AlfaLISA assay with 150 nM of purified hIgG1. Based on all above, antibodies were ranked, and top 16 antibodies were screened in AlfaLISA using dose-titration of the antibodies (150 nM, 3-fold dilution). Top 6 blocking human/cyno IL18-BP binders were selected for optimization.

[0805] Relevant CDR's from top 6 parental clones were shuffled into pre-made CDRH1 and CDRH2 libraries and 3 rounds of selections were performed at Adimab using human IL18-BP monomeric protein or cynomolgus monkey IL18-BP-HIS protein. 79 unique clones were identified and screened for the binding to monomeric human and cyno IL18-BP proteins in Octet.

[0806] Relevant CDR's from 79 unique clones were used to create CDRH3 and CDRL3 diversification libraries. CDRH3/L3 libraries were panned using precomplex of 10 nM of IL18-BP monomer with 100 nM of parental IgG to pressure for Koff enriched clones. 47 unique clones were identified and purified from the medium of the yeast expressing cells using affinity column. Analysis of top 47 antibodies included affinity measurements (Octet and Biacore) to cynomolgus monkey and to human IL18-BP monomeric protein. All 47 clones reached Koff limit of detection by Octet for 85-minute dissociation. Affinity of 47 clones to human and cynomolgus monkey IL18-BP was measured by Biacore, 24 out of 47 clones reached Koff limit of detection for 85 minute dissociation as measured by Biacore for human IL18-BP and 5 reached Koff limit of detection for 85 minute dissociation as measured by Biacore for cyno IL18-BP (FIG. 8). Competition with human IL18 for the binding of IL18-BP-Fc was performed in AlfaLISA assay with 15 nM of purified hIgG1 (FIG. 9).

### Blocking of Human and Cyno IL18-IL18-BP Interaction by ELISA

[0807] The blocking activity of the parental mAbs against human IL18-BP was analyzed by ELISA. As shown in FIG. 10, anti-human IL18-BP Abs (1:2, 4-0.06 μg/ml), showed dose-dependent blocking effect as compared to isotype control. Anti-human IL18-BP Abs (1:3, 10-0.01 μg/ml), showed dose-dependent blocking effect for cyno IL18: IL18-BP interaction as compared to isotype control (FIG. 11). IC50 values for the anti-human IL18-BP Abs are shown in FIG. 12.

Rescue of Free Human/Cyno IL18 from Pre-Complexed Human or Cyno IL18-IL18BP by Anti-IL-18BP Abs

[0808] The ability of anti-human IL-18BP affinity matured mAbs to release human IL18 bound by human IL18BP and cyno IL18 bound by cyno IL18BP protein was demonstrated using ELISA assay.

[0809] As shown in FIG. 31, anti-human IL18BP mAbs were able to release human IL18 from a pre-formed human IL-18:IL-18BP complex compared to isotype control.

[0810] As shown in FIG. 32, dose titration (10 μg/ml, serial dilution 1:3) of anti-human IL18BP mAbs released cyno IL18 from a pre-formed cyno IL-18:IL-18BP complex compared to isotype control.

Rescue of Free Human IL18 from Pre-Complexed Human IL18-IL18-BP by IL18 HEK293 Reporter Cells

[0811] The ability of the mAbs against human IL18-BP to rescue human IL18 bound by IL18-BP protein was demonstrated using IL18 HEK293 reporter cells. Addition of 30 ng/ml anti-human IL18-BP Abs was able to restore free IL18 for all tested Abs (FIG. 13).

[0812] Consensus sequence was generated using optimized sequences from each parental library using SnapGene MUSCLE alignment. High affinity IL18BP binders from each parental lineage were aligned to respective germline sequences. Consensus was generated with >90% threshold.

[0813] The 66650 lineage (VH1-03; VL-kappa-1-5) consensus sequence of CDRs (FIG. 1A) was generated using ADI-71701, ADI-71709, ADI-71710, ADI-71707 and ADI-71717 antibodies. The respective sequence alignment is shown in FIG. 3B.

[0814] The 66650 lineage (VH1-03; VL-kappa-1-5) consensus sequence comprises:
[0815] CDR-H1 having the sequence Y-T-F-X-X2-Y-A-X3-H, wherein X is N, R, D, G or K; X2 is S, H, I or Q; X3 is M or V;
[0816] CDR-H2 having the sequence W-I-H-A-G-T-G-X-T-X2-Y-S-Q-K-F-Q-G, wherein X is N, A or V; X2 is K or L;
[0817] CDR-H3 having the sequence A-R-G-L-G-X-V-G-P-T-G-T-S-W-F-D-P, wherein X is S or E;
[0818] CDR-L1 having the sequence R-A-S-Q-G-I-S-S-W-L-A;
[0819] CDR-L2 having the sequence E-A-S-S-L-E-S; and
[0820] CDR-L3 having the sequence Q-Q-Y-R-X-X2-P-F-T, wherein X is S, V, Y, L or Q; X2 is F, S, or G.

[0821] The 66670 lineage (VH1-69; VL-kappa-1-12) consensus sequence of CDRs (FIG. 1B) was generated using ADI-71719, ADI-71720, ADI-71722 and ADI-71728 antibodies. The respective sequence alignment is shown in FIG. 3C.

[0822] The 66670 lineage (VH1-69; VL-kappa-1-12) consensus sequence comprises
[0823] CDR-H1 having the sequence G-T-F-X-X2-Y-X3-I-S, wherein X is S or N; X2 is E or S; X3 is V or P;
[0824] CDR-H2 having the sequence G-I-I-P-G-X2-G-T-A-X3-Y-A-Q-K-F-Q-G, wherein X is G or Y, X2 is A or S; X3 is N, I or V
[0825] CDR-H3 having the sequence A-R-G-R-H-X-H-E-T, wherein X is S, G, or F;
[0826] CDR-L1 having the sequence R-A-S-Q-G-I-S-S-W-L-A;
[0827] CDR-L2 having the sequence A-A-S-S-L-Q-S; and
[0828] CDR-L3 having the sequence Q-Q-V-Y-X-X2-P-W-T, wherein X is S or R; X2 is L, I, or F.

[0829] The 66692 lineage (VH3-23, VL-kappa-1-12) consensus sequence of CDRs (FIG. 1C) was generated using ADI-71662, ADI-71663 and ADI-66692 antibodies. The respective sequence alignment is shown in FIG. 3A.

[0830] The 66692 lineage (VH3-23, VL-kappa-1-12) consensus sequence comprises:
[0831] CDR-H1 having the sequence F-T-F-X-N-X2-A-M-S, wherein X is G or D or S; X2 is T or V or Y;
[0832] CDR-H2 having the sequence A-I-S-X-X1-X2-G-S-T-Y-Y-A-D-S-V-K-G, wherein X is G or A; X2 is N or S; X3 is A or G;
[0833] CDR-H3 having the sequence A-K-G-P-D-R-Q-V-F-D-Y;
[0834] CDR-L1 having the sequence R-A-S-Q-G-I-X-S-W-L-A, wherein X is S or D;
[0835] CDR-L2 having the sequence A-A-S-S-L-Q-S; and
[0836] CDR-L3 having the sequence Q-H-A-X-X1-F-P-Y-T, wherein X is Y or L; X2 is S or F.

[0837] The 66716 lineage (VH1-39; VL-kappa-1-12) consensus sequence of CDRs (FIG. 1D) was generated using ADI-71736, ADI-71739 and ADI-66716 antibodies. The respective sequence alignment is shown in FIG. 3D.

[0838] The 66716 lineage (VH1-39; VL-kappa-1-12) consensus sequence comprises:
[0839] CDR-H1 having the sequence G-S-I-S-S-X-X2-Y-X3-W-G, wherein X is S or P; X2 is E or D; X3 is G, P or Y;
[0840] CDR-H2 having the sequence S-I-X-X2-X3-G-X4-T-Y-Y-N-P-S-L-K-S, wherein X is Y or V; X2 is Y or N; X3 is Q or S; X4 is S or A;
[0841] CDR-H3 having the sequence A-R-G-P-X-R-Q-X2-F-D-Y, wherein X is Y or H, X2 is V or L;
[0842] CDR-L1 having the sequence R-A-S-Q-G-I-S-S-W-L-A;
[0843] CDR-L2 having the sequence A-A-S-S-L-Q-S; and
[0844] CDR-L3 having the sequence Q-Q-G-X-X2-F-P-Y-T, wherein X is S or F; X2 is S or V.

### Example 11: Affinity of Anti IL-18BP AB to IL18BP Compared to IL-18BP:IL-18 by Kinexa and Biacore

[0845] Affinity of ADI-71739:IL-18BP vs IL-18:IL-18BP in human, cyno and clone W19089C (Biolegend): IL-18BP (KinExA) and mouse (Biacore) and characterization information.

[0846] The Kinetic Exclusion Assay (KinExA®) measures the equilibrium binding affinity and kinetics between unmodified molecules in solution. For affinity analysis, the equilibrium dissociation constant, Kd, is experimentally determined and reflects the strength of the binding interaction. The rate of association, Kon, is also experimentally determined, while the rate of dissociation, koff, is usually calculated based on the following equation: koff=Kd×kon.

[0847] A Kd analysis requires immobilization of one interaction partner to a solid phase which is then used as a probe to capture the other interaction partner, the constant binding partner (CBP). For each experiment, one of the binding partners is titrated in a background of the CBP and allowed to reach equilibrium. The solutions are then briefly exposed to the solid phase and a portion of free CBP is captured. The captured CBP is then labeled with a fluorescent secondary molecule. The short contact time with the solid phase is less than the time needed for dissociation of the pre-formed complex in solution, thus competition between the solution and the solid phase titrated binding partner is “kinetically excluded.” Since the solid phase is only used as a probe for the free CBP in each sample, the solution equilibrium is not altered during KinExA measurements. The signals generated from the captured CBP, which are directly proportional to the concentration of free CBP in the equilibrated samples, are used to determine the Kd value. The KinExA Pro software performs a least squares analysis on the measured data to fit optimal solutions for the Kd and the activity of the CBP to a curve representative of a 1:1 reversible bi-molecular interaction. For each data point along the curve, the x-axis reflects the molar concentration of the titrated binding partner, and the y-axis reflects the percentage of free CBP at that particular titrant concentration at equilibrium.

### SPR Affinity Measurements of Anti-IL18BP Binding to Mouse IL18BP

[0848] Fab preparation: Fab fragments were prepared from 1 mg of anti-IL18BP hIgG1 N97A yeast produced antibodies using Fab digestion kit (Pierce, cat. 44985). SDS PAGE gel analysis of purified Fab fragments was performed in reduced and non-reduced conditions

[0849] All experiments were performed in Biacore T100 optical biosensor (Global Life Sciences Solutions USA, Marlborough, MA)

### Capture Chip Preparation

[0850] A human Fc capture reagent (Cytyva, BR1008-39) was covalently coupled to flow cells 3 and 4 of a CM5 sensor chip surface via standard amine coupling at 10 μg/mL in pH 5 acetate buffer, followed by a six-minute blocking step with ethanolamine (1.0 M, pH 8.5).

### Mouse IL18BP Binding Kinetics to Anti-IL18BP Fab

[0851] For antigen capture in solution experiments, each experiment cycle began with an injection (60 s at 5 μL/min) over flow cells 3 and 4 of a 10 μg/ml solution of mouse IL18BP-Fc or hIgG1 isotype control, respectively. Upon capture of mouse IL18-BP-Fc fusion or isotype control to the sensor surface, a series of Fab concentrations (300-2.21 nM, 2-fold dilution) was injected (60 s at 30 μL/min) over flow cells 3 and 4. The dissociation of the Fabs were monitored for 900 s. Several blank buffer samples were injected (60 s at 30 μl/min) over flow cells 3 and 4 and used for reference surface subtraction. Finally, an injection (60 s at 10 μL/min) of regeneration solution (10 mM Glycine pH=1.5) over flow cells 3 and 4 prepared the sensor surface for another cycle.

[0852] As seen in FIG. 52, ADI-71739 binds human and cyno IL-18BP (Kd˜291 fM, Kd˜208 fM respectively) at higher affinity than human and cyno IL-18 (Kd˜441 fM, Kd˜345 fM respectively). ADI-71739 binds mouse IL-18BP (Kd˜4 nM) at lower affinity than IL-18 (Kd˜3.7 pM).

### Example 12: IL-18BP—Biochemical Comparison Between Commercial Abs and Adimab Anti IL-18BP Ab

### Methods:

Blocking of hIL18BP-hIL-18 Interaction Using a-hIL18BP Abs by ELISA-IL18BP Plate Bound

[0853] This assay was utilized to identify anti-human IL18BP Abs that inhibit the binding interaction between human IL18BP- and its counterpart, human IL-18. Commercial Ab anti human IL18BP (clone W19089C, cat. 947703, Biolegend), ADI-71739 and ADI-71722 were tested for inhibition of human IL18BP protein binding to IL-18 by ELISA. Human IL18BP-Fc protein was coated on the wells of a high binding plate overnight at 4° C. (1 μg/ml, 100 μl/well volume). Plates were washed three times with PBS-T buffer (1×PBS pH 7.4, 0.05% Tween20) incubated with 250 μL blocking buffer (2.5% skim milk in PBS) at room temperature (RT) for 2 hr. Blocking buffer was removed and plates were washed three times with PBS-T buffer. Plate-bound ligands were incubated with anti-human IL18BP Abs in 1% BSA in PBS buffer two times serially diluted (2.5-0.019 μg/ml, 100 μL/well volume) at RT for 1 h. Plates were washed one time with PBS. Plate-bound ligands were incubated with human IL-18 (cat. 9124-IL, R&D) in in 1% BSA in PBS buffer (1 ng/ml, 100 μL/well volume) at RT for 1 h. Plates were washed three times with PBS-T (0.05% Tween20 in PBS). Biotinylated anti-IL18 detection antibody, cat. D045-6, R&D 1:1000 in 1% BSA in PBS buffer was added (100 μL/well). This was incubated at RT for 1 hr, and plates were washed again. Peroxidase Streptavidin, Jackson, cat. 016-030-084 1:1000 in 2.5% skim milk in PBS was added (100 μL/well) for 1 hr at RT. Plates were washed three times with PBS-T buffer (1×PBS pH 7.4, 0.05% Tween20). ELISA signals were developed in all wells by adding 50 μL of TMB substrate and incubating for signal development, 1.45 min. The HRP reaction was stopped by adding 50 μL 1N HCl and absorbance signals at 450 nm were read on a luminescence Reader-EnSpire (Perkin Elmar). The data were exported to Excel (Microsoft) and plotted in GraphPad Prism (GraphPad Software, Inc.).

### Competition ELISA Using Complex of Soluble IL18-IL18BP and Anti IL18BP Abs

[0854] This assay was utilized to identify anti-human IL18BP Abs that inhibit the binding interaction between human IL18BP- and its counterpart, human IL-18. Commercial Ab anti human IL18BP (Clone 136007, cat. MAB1191, R&D systems) and ADI-66716 were tested for inhibition of human IL18BP protein binding to IL-18 by ELISA. Human IL18BP antibody (cat.AF 119, R&D) was coated on the wells of a high binding plate overnight at 4° C. (1 ug/ml, 100 μl/well volume). Plates were washed three times with PBS-T buffer (1×PBS pH 7.4, 0.05% Tween20) incubated with 250 μL blocking buffer (2.5% skim milk in PBS) at room temperature (RT) for 2 hr. Blocking buffer was removed and plates were washed three times with PBS-T buffer. Complex pre-formed 1 hour at 37° C. with 0.25 nM human IL-18-BP (R&D, cat. 119BP) and 3 nM Human IL-18 Biotin (9124-IL, R&D) in 1% BSA in PBS buffer. Complex was incubated for 2 hrs at RT together with anti-human IL18BP Abs (in 1% BSA in PBS buffer two times serially diluted. 4-0.06 μg/ml, 100 μL/well volume). Peroxidase Streptavidin, Jackson, cat. 016-030-084 1:1000 in 2.5% skim milk in PBS was added (100 μL/well) for 1 hr at RT. Plates were washed three times with PBS-T buffer (1×PBS pH 7.4, 0.05% Tween20). ELISA signals were developed in all wells by adding 50 μL of TMB substrate and incubating for signal development. The HRP reaction was stopped by adding 50 μL 1N HCl and absorbance signals at 450 nm were read on a luminescence Reader-EnSpire (Perkin Elmar). The data were exported to Excel (Microsoft) and plotted in GraphPad Prism (GraphPad Software, Inc.).

### Results:

[0855] Blocking activity of AB-71739 and AB-71722 was compared to anti-IL18BP Ab commercial antibody (clone W19089C, Biolegand). As seen in FIG. 53, the blocking effect of AB-71739 and AB-71722 was superior to Biolegend Ab.

[0856] Affinity of Biolegend antibody (cat. 947703, clone W19089C) to human IL18BP was measured by KinExA and was found to be 63.8 pM (See method in Example 11).

[0857] Blocking activity of ADI-66716 was compared to anti-IL18BP Ab commercial antibody (Clone 136007, cat. MAB 1191, R&D systems) in soluble blocking ELISA assay. FIG. 54 showed that ADI-66716 (right hand bars) had superior blocking effect to R&D antibody.

[0858] Affinity of R&D antibody (cat. MAB1191) to human IL18BP was measured by Biacore and was found to be 2.73*10\hat{ }-10 M (FIG. 76).

### Example 13: Functional Assessment of Anti-IL18-BP Abs from Adimab Campaign

### Methods:

### NK-Based Assay for Functional Assessment of Anti-IL18-BP Antibodies

[0859] Human NK cells were thawed in RPMI 1640 with 20% FBS and washed once more with full RPMI (RPMI 1640, 10% FBS, 1% Glutamax, 1% Penicillin-Streptomycin Solution). The cells were then seeded at 50 k cells/well in a 96 well plate and incubated 30 minutes in 37° C., 5% C02 incubator with a combination of rhIL-12 (10 ng/ml, R&D systems, 10018-1L/CF), rhIL-18 (3 ng or 10 ng/ml, R&D systems, 9124-IL/CF) and rhIL-18BP-Fc chimeric protein (1 μg/ml, R&D systems 119-BP) to allow IL-18+IL-18BP complex formation. After 30 minutes, decreasing concentrations of anti-human IL-18BP mAbs or relevant isotype control were added to the culture to examine their capability to restore IL-18 activity. Cells and all added solutions were prepared in full RPMI media to a final volume of 150 μl/well. Plates were incubated for 24 hours in 37° C., 5% CO2 incubator, after which the supernatant was collected for IFNγ secretion evaluation. On some occasions cell pellets were harvested and stained for membrane CD69 levels as a measurement of NK cell activation. All tests were done in triplicates and each repeated with four donors.

### PBMC-Based Assay for Blocking Endogenously Secreted IL-18BP

[0860] Human PBMCs were thawed in RPMI 1640 with 20% FBS, washed once more with full RPMI (RPMI 1640, 10% FBS, 1% Glutamax, 1% Penicillin-Streptomycin Solution) and incubated in a T-75 flask for 24 hours in 37° C., 5% CO2 incubator to allow recovery. The cells were then seeded at 200 k cells/well in a 96 well plate and cultured with a combination of rhIL-12 (10 ng/ml, R&D systems, 10018-1L/CF), rhIL-18 (33.3 ng/ml or 2 ng/ml, R&D systems, 9124-IL/CF) and decreasing concentrations of anti-human IL-18BP mAbs or isotype control. Cells and all added solutions were prepared in full RPMI media to a final volume of 150 μl/well. Plates were incubated for 24 hours in 37° C., 5% CO2 incubator, after which supernatant was collected for IFNγ secretion evaluation. IL-18BP secretion was confirmed by IL-18/IL-18BP complex ELISA (R&D Systems, DY8936-05, not shown). All tests were done in triplicates and each repeated with two donors for ADI66716 and ADI66692, and five donors for affinity matured antibodies.

### CD69 Expression

[0861] After 24 hours of incubation, NK cell pellets were collected, washed from residual medium with PBS and labeled with a viability dye (Zombie NIR) diluted 1:1000 in PBS for 15 min at RT, in the dark. The cells were then incubated with Fc receptor blocking solution (Trustain Fcx, Biolegend, 2.5 μl/reaction) for 10 min at room temperature. To detect cell surface expression of CD69, the cells were incubated with PE-anti-human CD69 Ab (BioLegend, 1 μg/ml) for 30 min on ice, in the dark. The cells were then washed once and analyzed using MACSquant analyzer.

### Cytokine Secretion

[0862] To measure IFNγ secretion from the cells, supernatants were collected 24 hours post stimulation and tested by CBA human IFNγkit (BD Biosciences, 558269) for NK cells or CBA Human Th1, Th2, Th17 cytokine kit (BD Biosciences, 560484) for PBMCs.

### Data Analysis and Statistics

[0863] All FACS files were analyzed by FlowJo software. Where applicable, EC50s were calculated using GraphPad Prism software.

### Results:

Analysis of mAbs Performance in Blocking of mIL18-BP-mIL-18 Interaction in an In-Vitro NK Based Assay

[0864] The functional blocking activity of mAbs against recombinant human IL18-BP was evaluated by an NK-based assay. As shown in FIG. 14, anti-human IL18-BP Abs were able to block recombinant IL-18BP and fully restored IL-18 activity, depicted by IFNγ secretion and CD69 expression in a dose dependent manner as compared with the isotype control. EC50 value were in the single and double-digit nM range.

Analysis of mAbs Performance in Blocking of mIL18-BP-mIL-18 Interaction in an In-Vitro PBMC Based Assay

[0865] The functional blocking activity of mAbs against endogenous human IL18-BP was evaluated by an PBMC-based assay. As shown in FIG. 15, anti-human IL18-BP Abs were able to block endogenous IL-18BP and to restore IFNγ secretion in a dose dependent manner as compared with the isotype control.

### Example 14: Functional Assessment of Anti IL-18BP Abs in T Cell Based Assay and in Combination with ICB

[0866] A soluble immune checkpoint up-regulated in the TME in response to IFNγ. αIL-18BP restores T and NK activity. This provides a proposed mechanism for anti-PD-1 resistance in IFNγ-high patients.

[0867] Activity: In vitro—αILL-18BP restores T and NK cells activity. In vivo activity with αIL-18BP Ab demonstrates tumor growth inhibition both as a monotherapy and in combination with ICB.

### MEL624:TIL Assay for Functional Assessment of Anti-IL18-BP Antibodies

### Methods:

[0868] Human MEL624 cells were thawed and grown in DMEM with 10% FBS, 1% Glutamax, 1% Penicillin-Streptomycin Solution and 1% HEPES buffer. The cells were then seeded at 75 k cells/well in a 96 well plate in the assay medium (IMDM with 10% human serum, 1% Glutamax, 1% MEM eagle, 1% Sodium Pyruvate and 1% Penicillin-Streptomycin Solution) and incubated 1 hour in 37° C., 5% CO2 incubator before co-culture with human tumor infiltrating lymphocytes that were previously expanded using known melanoma antigens (TILs). Human TILs were thawed in full TIL media and 75 k cells/well were co-cultured with the MEL624 cells to create an effector: target ratio of 1:1. The co-cultured cells were then treated with rhIL-18 (30 ng/ml) and rhIL-18BP (1 μg/ml) for 30 min in 37° C., 5% CO2 incubator to allow IL-18:IL-18BP complex formation. After 30 minutes, anti-human IL-18BP mAb (ADI-71722, dose titration, 30 μg/ml-0.01 μg/ml, dilution factor of 1:3) or relevant isotype control (hIgG1 30 μg/ml) were added to the co-culture to examine its capability to restore IL-18 activity. Cells and all added solutions were prepared in full assay medium to a final volume of 200 μl/well. Plates were incubated for 24 hours in 37° C., 5% CO2 incubator, after which the supernatant was collected for cytokine secretion evaluation. All tests were done in triplicates and each repeated with TIL four donors.

### Cytokine Secretion

[0869] To measure cytokine secretion from the cells, supernatants were collected 24 hours post stimulation and tested by CBA Human Th1, Th2, Th17 cytokine kit (BD Biosciences, 560484).

[0870] Where applicable, the EC50 value was calculated using GraphPad Prism software.

### Results:

[0871] The functional blocking activity of mAbs against recombinant human IL18-BP was evaluated by a MEL624:TIL assay. As shown in FIGS. 49A-B and 50, the anti-human IL18-BP Ab (ADI-71722), was able to block recombinant IL-18BP and to fully restore IL-18 activity, depicted by IFNγ secretion, in a dose dependent manner as compared with the isotype control.

CMV Recall Assay for Functional Assessment of Anti-IL18-BP Abs as Mono and in Combination with Anti-PVRIG/Anti-TIGIT/Pembrolizumab

### Methods:

[0872] Human MEL-624 overexpressing PD-L1 cells were thawed and loaded with CMV pp65 peptide (0.03 μg/ml). The cells were seeded at 100K/well in a 96 well plate and incubated for 30 minutes in 37° C., 5% C02 incubator with a combination rhIL-18 (30 ng/ml, R&D systems, 9124-IL/CF) and rhIL-18BP-Fc chimeric protein (2 μg/ml, R&D systems 119-BP) to allow IL-18+IL-18BP complex formation. After 30 minutes, anti-human IL-18BP (ADI-71722), anti-human PVRIG, anti-human TIGIT (anti-TIGIT), anti-human PD1 (Pembrolizumab) or relevant isotype control (hIgG4) were added to the culture to examine their capability to restore IL-18 activity. All antibodies were added to a final concentration of 10 μg/ml. 30 minutes post incubation with antibodies, thawed CMV-reactive T-cells were added to the culture. Cells and all added solutions were prepared in full IMDM (IMDM media with 10% human serum, 1% Glutamax, 1% MEM eagle, 1% sodium pyruvate, and 1% Penicillin-Streptomycin Solution) to a final volume of 200 μl/well. Plates were incubated for 24 hours in 37° C., 5% C02 incubator, after which the supernatant was collected for IFNγ secretion evaluation. All tests were done in triplicates and each repeated with three donors.

### Results:

[0873] The functional blocking activity of mAbs against recombinant human IL18-BP was evaluated by CMV recall assay. As shown in FIGS. 49C-D and 51, the anti-human IL18-BP Ab was able to block recombinant IL-18BP and to fully restore IL-18 activity, as depicted by IFNγ secretion. Combination of the anti-IL-18BP Ab with anti-PVRIG/anti-TIGIT/Pembrolizumab resulted in greater IFNγ secretion indicating a beneficial effect on T-cell activation.

### Example 15: Functional Assessment of Anti IL-18BP Abs in T Cell Based Assay and in Combination with ICB

### Whole Blood Assay

[0874] As shown in FIG. 66, anti-IL-18BP antibody Ab-71709, as mono or in combination with Nivolumab, did not show signs of systemic immune activation in ID. Flow, an ex vivo system that mimics the human blood circulation. Fresh whole blood was taken from six healthy volunteers and immediately transferred to a whole blood loop system. The test items were administered, and the blood was set to circulate at 37° C. to prevent clotting. Blood samples collected at the 24 hr time point were analyzed for hematology and flow cytometry parameters and then processed to plasma for cytokine analysis. The anti-CD52 antibody Alemtuzumab was included as a reference antibody with manageable cytokine release in the clinic. As opposed to Alemtuzumab, according to the various readouts employed, the anti-IL-18BP antibody did not induce any signs of systemic immune activation, as mono or in combination with the anti-PD1 antibody Nivolumab.

### In Vitro Studies Testing the Effects of ADI-71739 on Killing of Melanoma Cells by Human TILs

[0875] As shown in FIG. 67, Anti-IL18-BP antibody ADI-71739 increased killing of melanoma cells by tumor infiltrating lymphocytes. Schematic representation of assay setup is shown in FIG. 67A. MEL624 cells were co-cultured with human TILs that were previously enriched for MART1 or gp100 peptide-specific clones. rhIL-18 (R&D systems, 50 ng/ml) and rhIL-18BP (R&D systems, 1 μg/ml) were added to the co-culture for 30 minutes to allow the formation of IL-18:IL-18BP complex prior to treatment with 10 μg/ml ADI-71739 or isotype control. The co-culture was monitored for 72 hours using an IncuCyte live cell imaging instrument. As shown in FIG. 67B, addition of IL-18 (grey) enhanced tumor cell killing as indicated by lower confluence (left) and increased apoptosis (right) over time of the MEL624 cells. In the presence of the isotype control antibody (black), IL-18BP abrogated the effects of IL-18, while the anti-IL-18BP antibody (turquoise) was able to completely restore these effects.

In Vitro Studies Testing the Effects of Combination of ADI-71739 Ab with Other Checkpoint Blocking Antibodies

[0876] As shown in FIG. 68, ADI-71739 increased IFNg secretion by CMV-specific T cells as mono and in combination with aPVRIG/aTIGIT/Pembrolizumab. Schematic representation of assay setup is shown in FIG. 68A. MEL624 cells that overexpress PD-L1 were loaded with CMV peptide pp65. The cells were cultured for 30 minutes with rhIL-18 (R&D systems, 30 ng/ml) and rhIL-18BP (R&D systems, 2 μg/ml) to allow the formation of IL-18:IL-18BP complex, and the cells were then treated with 10 μg/ml ADI-71739 or aPVRIG (anti-PVRIG) or aTIGIT (anti-TIGIT) or Pembrolizumab (anti-PD-L1) or isotype control, as mono or in various combinations. CMV-specific T-cells were then added to the culture and IFNg secretion was measured after an overnight incubation. As shown in FIG. 68B, ADI-71739 alone was able to increase IFNγ secretion by the T cells, and this effect was augmented upon combination with Pembrolizumab/aPVRIG/aTIGIT.

### In Vitro Studies Testing the Effects of ADI-71739 on Human TIL Function in the Presence of Endogenous IL-18BP Levels

[0877] As shown in FIG. 69, Anti-IL18BP antibody ADI-71739 increased IFNg release by tumor infiltrating lymphocytes. A. Schematic representation of assay setup. MEL624 cells were co-cultured with human TILs that were previously enriched for MART1 or gp100 peptide-specific clones. IL-18 (3.7 ng/ml) was added to the co-culture along with 5 μg/ml ADI-71739 or isotype control. The co-culture was set for 18 hours following which IFNg levels were measured in supernatants. B. IFNg levels were increased in co-cultures treated with ADI-71739 (turquoise) as compared with isotype-treated samples (black). Representative examples from two TIL donors are shown.

### Bound IL-18 Levels in the TME are Above Required Amount for T Cell Activation In Vitro

### Methods:

[0878] Human MEL624 cells were thawed and grown in DMEM with 10% FBS, 1% Glutamax, 1% Penicillin-Streptomycin Solution and 1% HEPES buffer. The cells were then seeded at 75 k cells/well in a 96 well plate in the assay medium (IMDM with 10% human serum, 1% Glutamax, 1% MEM eagle, 1% Sodium Pyruvate and 1% Penicillin-Streptomycin Solution) and incubated 1 hour in 37° C., 5% CO2 incubator before co-culture with human tumor infiltrating lymphocytes that were previously expanded using known melanoma antigens (TILs). Human TILs were thawed in full TIL media and 75 k cells/well were co-cultured with the MEL624 cells to create an effector: target ratio of 1:1. The co-cultured cells were then treated with rhIL-18 (1.23-300 ng/ml). Cells and all added solutions were prepared in full assay medium to a final volume of 200 μl/well. Plates were incubated for 24 hours in 37° C., 5% CO2 incubator, after which the supernatant was collected for cytokine secretion evaluation. All tests were done in triplicates.

[0879] Tumor were cut into small pieces with a scalpel and transferred to GentleMACs™ C tubes (Miltenyi Biotec) containing an enzyme mix using human tumor Dissociation Kit (Miltenyi Biotec), as per the manufacturer's protocol. After dissociation, samples were centrifuged at 300 g for 5 minutes and supernatants were collected and recentrifuged at 3130 g for 10 minutes. Following centrifugation, supernatants were recollected and distributed in aliquots for storage at −80° C. At the day of the assay, samples were thawed at room temperature and subsequently centrifuged at 14,000 RPM for 10 min and supernatants were collected for immediate usage in ELISAs with the following kits:
[0880] Human IL18 ELISA kit (MBL,7620)
[0881] Human IL18 free detection kit (in house protocol)

### Human Free IL18 ELISA Protocol:

[0882] Anti-human IL18 hIgG1 clone 12GL (patent US 2014/0004128A1) was diluted to 1 μg/ml in PBS and coated on ELISA plate overnight at 4° C. (100 μl/well). Coated plates were washed three times with PBST and incubated with 300 μl blocking buffer (1% BSA in PBS) at room temperature (RT) for 2 hrs. Blocking buffer was removed and plates were washed three times with PBST. Human healthy donor serums were diluted 1:2 with 1% BSA in PBS. Standard curve was generated by incubating 2-fold serial dilutions of human IL18 (starting at 1 ng/ml) in 1% BSA in PBS. Plates were washed three times with PBST buffer (1×PBS pH 7.4, 0.05% Tween20) and 100 μl/well biotinylated anti-IL18 detection antibody, cat.D0456 R&D; 1:1000 diluted in 1% BSA in PBS was added. This was incubated for 1 hr and plates were washed again as described above after antibody binding. 100 μl/well horse radish peroxidase HRP-conjugated streptavidin, Jackson, 1:1000 was added, and plates were incubated for 1 hr at RT. Plates were washed again as described above after antibody binding. ELISA signals were developed in all wells by adding 50 μL of TMB substrate (Scytek) and incubating for 5-20 mins. The HRP reaction was stopped by adding 50 μL 1N HCL and absorbance signals at 450 nm were read (EnSpire, Perkin Elmar). The assay was done in duplicate. Data was analyzed using GraphPad Prism software.

### Results:

[0883] A schematic representation of assay setup is shown in FIG. 70A, thawed tumor infiltrating lymphocytes (TILs), co-cultured with MEL624 cells in a 1:1 ratio, were treated with rhIL-18 (R&D systems, 1.23-300 ng/ml) for 24 hr. As can be seen in FIG. 70B, rhIL-18 increased IFNγ secretion in a dose-dependent manner. rhIL-18 activates TILs in concentration above ˜1 ng/ml and reached saturation at ˜100 ng/ml.

[0884] FIG. 70C: Levels of bound IL-18 in TDS across indications are mostly above the level required for in vitro T cell activation. Bound IL18 levels were calculated by deducting IL18 free from total IL-18 measured for each sample by two separate ELISA kits. Dashed red line represent the level required for functional activity (1.5 ng/gr). Black lines represent the median level bound IL-18 for each tumor type.

### Example 16: Generation and Characterization of Custom Abs Against Mouse IL18-BP Protein

### Methods:

### Generation of Fab's Against Mouse IL18-BP Protein

[0885] Fab's were raised at AbD Serotec (Bio Rad, Germany) using Human Combinatorial Antibody Library (HuCAL®) production service. The HuCAL® library is based on the human IgG1 Fab format, which consists of the first two domains of the antibody heavy chain and the complete light chain.

### Study Design

[0886] Generation of Fab's against mouse IL18-BP was performed at AbD Serotec (Bio Rad, Germany). Antibodies against the mouse IL18-BP protein were raised using the HuCAL® phage library, using 3 rounds of enrichment and counter selection against non-related human IgG1 fusion protein for the depletion of unspecific antibodies. Next, the enriched antibody pool from the phage display vector was subcloned into expression vector to determine the final Fab format. The selected Fab format is Fab-FH (Monovalent Fab mini Ab containing a Flag and 6 His tag) The antibodies were raised using the mouse IL18-BP Fc fusion protein, mouse IL18-BP fused to human IgG1.

### Anti-Mouse IL18-BP Fab's Generation

[0887] Fab's generation at AbD Serotec included the following steps:
[0888] 1. Antigen immobilization—immobilization of the antigen on a solid support. The standard method uses covalent coupling to magnetic beads.
[0889] 2. Phage display selection—panning—The HuCAL® platinum library presented on phage particles is incubated with the immobilized antigen. Nonspecific antibodies are removed by extensive washing and specific antibody phage are eluted by adding a reducing agent. An E. coli culture is infected with eluted phage and helper phage to generate an enriched antibody phage library for the next panning round. Typically, three rounds of panning.
[0890] 3. Subcloning into antibody expression vector—After panning, the enriched antibody DNA is isolated as a pool and subcloned into a Fab expression vector. E. coli are transformed with the ligation mixture and plated on agar plates. Each growing colony represents a monoclonal antibody at this stage.
[0891] 4. Primary screening—Colonies are picked and grown in a 384-well microtiter plate. Antibody expression is induced, and the culture is lysed to release the antibody molecules. Cultures are screened for specific antigen binding by ELISA.
[0892] 5. Secondary screening—K off ranking of top 95 ELISA-positive clones included using Bio-Layer Interferometry (BLI) technology on a label-free, dip-and-read biosensor platform (ForteBio Octet® RED384) Sequencing—Hits from the primary and secondary screening experiment are sequenced to identify unique antibodies.
[0893] 6. Expression and purification—The unique Fab's are expressed and purified using one-step affinity chromatography.
[0894] 7. Antibody QC—Purified Fab's are tested by ELISA using recombinant protein.
   Analysis of the mAbs Performance

### Binding Measurement of Anti-Mouse IL18-BP Abs to Mouse IL18-BP Protein by ELISA

[0895] Mouse IL18-BP His fusion protein (Sino Biological) was coated on the wells of a high binding plate overnight at 4° C. (2.5 μg/ml, 50 μl/well volume). Mouse anti histidine tag HRP was used to ensure mouse IL18-BP His coating (diluted 1:500 in blocking buffer). Coated plate was rinsed once with PBS and incubated with 250 μL blocking buffer (2.5% skim milk in PBS-indicated per experiment) at room temperature (RT) for 2 hr. Blocking buffer was removed, plate was rinsed once more with PBS, and incubated with anti-mouse IL18-BP Abs from Biorad (1:3, 5-0.002 μg/ml, 50 μL/well) for 2 hr at RT. Plate was washed 3 times with PBS-T (0.05% Tween20 in PBS), followed by one wash once with PBS, and incubated with HRP-conjugated secondary antibody (50 μL/well) for 1 hr at RT. Plate was washed 3 times with PBS-T, once with PBS, and incubated with TMB substrate solution (50 μL/well) at RT to allow signal development. The HRP reaction was stopped by addition of 1N HCl solution (50 μL/well), and absorbance signal was read at 450 nm on a luminescence Reader (EnSpire, Perkin Elmar). Data were exported to Excel (Microsoft) and plotted in GraphPad Prism (GraphPad Software, Inc.).

### Affinity Measurement to Mouse IL18-BP Protein by BiaCore

[0896] 1. Immobilization of anti-human Fc: all SPR measurements were performed with BiaCore T-100 instrument in PBS 0.05% Tween 25 running buffer. Series S CM5 chip (cat. BR100530 Cytiva) was primed for 7 min in running buffer. Normalization of the chip was performed with 8 min injection of 70% glycerol. Mouse antibody capture kit (cat. BR100838 Cytiva) was used for the capture. 0.4 M 1-ethyl-3-(3-dimethylaminopropyl)-carbodiimide in water was mixed with 0.1 M N-hydroxysuccinimide in water in 1:1 ratio and chip surface was activated for 420 sec at 10 μl/min. Next, 30 μg/ml of mouse Fc capture reagent diluted in immobilization buffer (10 mM sodium acetate pH 5.0, cat. BR100838 Cytiva) was injected at 5 μl/min over all 4 channels until ARU reached 12000 RU. Chip was blocked with 1 M ethanolamine-HCl pH 8.5 at 10 μl/min for 7 min.
[0897] 2. Capturing of anti-mouse IL18-BP antibodies: For capture, AB-837 mIgG1 D265A (AbD35328) was diluted to 10 μg/ml in running buffer and injected at 5 μl/min rate over specific channel. CH1 was used for capture of isotype control (synagis mIgG1 D265A). The injection was stopped when capture levels reached ˜250 RU.
[0898] 3. Kinetic measurements of anti-mouse IL18-BP Ab: 12 two-fold serial dilutions of mouse IL18-BP-Fc (cat. 122-BP, R&D) starting from 256 nM diluted in running buffer was injected over all channels at 30 μl/min for 180 sec. Dissociation of the bound protein from captured antibodies was monitored for 1000 sec. Chip surface was regenerated with 10 μl/min injection of glycine-HCl pH 1.7 for 60 sec after each cycle. The resulting sensorgrams were processed and double-referenced using a Biacore T100 evaluation software. Where appropriate, the sensorgrams were fit with a simple 1:1 kinetic binding model.
   Blocking of mIL18-BP-mIL-18 Interaction by ELISA

[0899] Anti-mouse IL18-BP Abs from Biorad were tested for inhibition of mouse IL18-BP His fusion protein binding to IL-18 (Sino Biological) by ELISA. IL18-BP His fusion protein was coated on the wells of a high binding plate overnight at 4° C. (2.5 μg/ml, 50 μl/well volume). Coated plate was rinsed once with PBS and incubated with 250 μL blocking buffer (2.5% skim milk in PBS) for 2 hr in room temperature (RT). Buffer was removed and plate was washed and incubated with serial dilutions of anti-mouse IL18-BP Abs from Biorad, (1:2, 5-0.04 μg/ml, 50 μL/well) at RT for 30 min. Plate was washed and incubated with mouse IL-18 biotinylated in blocking buffer (1 μg/ml, 50 μL/well volume) at RT for 1 hr. Plate was washed, and HRP-conjugated secondary antibody was added (50 μL/well) for 1 hr at RT. ELISA signal was develop as describe above. Blocking was calculated as a decrease in the binding signal of biotinylated mouse IL-18 to IL18-BP-His protein in the presence of an Ab compared to the binding signal in the presence of an isotype control.

Blocking of mIL18-BP-mIL-18 Interaction In-Vitro

[0900] Mouse CD3+ T cells were isolated from freshly harvested spleens of C57BL/6 mice using the EasySep™ Mouse T Cell Isolation Kit according to manufacturer's instructions and plated on anti-CD3-coated (10 μg/ml) T-75 cm² flasks at 0.8*10\hat{ }6 cells/ml. Anti-CD28 (1 μg/ml) was supplemented and cells were cultured for 3 days at 37° C., 5% CO₂. Cells were subsequently harvested, washed and cultured in the presence of rmIL-12 (2 ng/ml) for 24 additional hours. The next day, IL-18 and IL-18 BP were allowed to complex for 30 minutes at 37° C., 5% CO₂ in 96-well plates (25 μl from each/well) and anti-IL-18 BP mAbs (serial dilutions, 25 μl/well) were added for additional 30 minutes. Cells were harvested, washed, supplemented with rmIL-12 (0.1 ng/ml final) and added to the IL-18/IL-18 BP/anti-IL-18 BP containing wells (40K/25 μl/well) for 24 hrs at 37° C., 5% CO₂. Following the 24 h culture, supernatants were collected for IFNγsecretion analysis by the mouse Th1/Th2/Th17 Cytometric Bead Array (CBA, BD Biosciences).

### Results:

### Anti-Mouse IL18-BP Fab's Generation

[0901] The panning was performed at BioRad using mouse IL18-BP fused to Fc of hIgG1 protein in 3 rounds of selection and counter selection against non-relevant Fc tagged control protein (Recombinant Mouse IL-15R alpha Fc Chimera Protein R&D cat.551-MR-100) for depletion of unspecific antibodies.

[0902] In the first screen ˜360 clones were examined for binding to mouse IL18-BP vs non-relevant protein by ELISA assay. Out of ˜360 clones, 150 were identified as positive binders to mouse IL18-BP. A secondary screen of top 95 ELISA-positive clones included koff ranking using Bio-Layer Interferometry (BLI) technology on a label-free, dip-and-read biosensor platform (ForteBio Octet® RED384), where Abs were ranked based on their slowest of rate. Confirmatory screen by ELISA resulted in 41 positives unique Fab's binders. Fab's were purified and their binding to mouse IL18-BP was confirmed by ELISA. The 41 Fab's were further analyzed by affinity measurement to mouse IL18-BP protein, blocking activity and binning (ELISA, data not shown). Eleven Fab's, which belonged to the same bin, showed high blocking and binding activity were identified.

[0903] Reformation of the Fab's into full length immunoglobulin was done by BioRad. The conversion to mouse IgG1 D256A was done to top 6 Fab's (AbD35357, AbD35327, AbD35346, AbD35328, AbD35350, AbD35344).

Analysis of the mAbs Performance

### Affinity Measurement to Mouse IL18-BP Protein by ELISA

[0904] The affinity of the 6 BioRad purified mAbs against mouse IL18-BP was analyzed by ELISA. As shown in FIG. 16, anti-mouse IL18-BP, AbD35328 (also called “AB-837”, “837”, “Ab837”) binds mouse IL18-BP His fused protein (2.5 μg/ml) with Kd value of 0.4 nM.

### SPR Kinetic Measurement of Anti-Mouse IL18-BP (AbD35328)

[0905] The binding of anti-mouse IL18-BP mAb, AbD35328, to mouse IL18-BP-Fc protein is demonstrated in FIG. 17. For this interaction, k off constant was below the limit of detection of the instrument (<10\hat{ }-9 1/S) and ka=4.93*10\hat{ }4 1/M*s. KD value couldn't be uniquely determined, and it was estimated that the value is below 1*10\hat{ }-12M.

Analysis of mAbs Performance in Functional Blocking of mIL18-BP-mIL-18 Interaction

[0906] The blocking activity of the 6 BioRad purified mAbs against mouse IL18-BP was analyzed by ELISA. As shown in FIG. 18, anti-mouse IL18-BP Ab (1:2, 5-0.04 μg/ml 2.5% skim milk in PBS), showed dose dependent blocking effect as compared to isotype control. IC50 value for anti-mouse IL18-BP (AbD35328) is 3.3 nM (FIG. 19).

Analysis of mAbs Performance in Blocking of mIL18-BP-mIL-18 Interaction in an In-Vitro T Cell Activation Assay

[0907] The functional blocking activity of the BioRad purified mAbs against mouse IL18-BP was evaluated in a T cell activation assay. As shown in FIG. 20, anti-mouse IL18-BP Ab (AbD35328) showed a dose dependent blocking effect by enhancing the IFNγ secretion as compared to isotype control. EC50 value for anti-mouse IL18-BP is 7.9 nM (FIG. 21).

### Example 17: Efficacy of Anti IL-18BP as Monotherapy and in Combination with Immune Checkpoints Blockers

[0908] This example describes the efficacy of anti-mouse IL18-BP mAb treatment in CT26 murine colon carcinoma model, B16/Db-hmgp100 melanoma model, MC380VA^{dim} CRC model and E0771 triple negative breast cancer (TNBC) model as monotherapy or in combination with immune checkpoints blockers.

### Materials and Methods

### Tumor Challenge Experiments:

[0909] CT26 colon carcinoma was purchased from ATCC (CRL-2638). Cells were cultured in RPMI 1640 (Biological Industries, 01-100-1A) with 10% FBS (Biological Industries, 04-127-1A), and 100 μg/mL penicillin/streptomycin (Biological Industries, 03-031-1B). For tumor implantation, cells were harvested and washed, counted, suspended in cold RPMI 1640 and placed on ice. BALB/c mice ((female, 8 wk) Envigo), were anesthetized with 10% Ketamine (Clorketam; SAGARPA Q-7090-053) and 10% Xylazine (Sedaxylan; BE-V254834) mixture injected intraperitoneal. Next, the back of the mice was shaved and disinfected with a 70% Ethanol solution. Tumor cells were injected as 50 μl of 2.5×10⁵ CT26 cells subcutaneously into the back right flank of mice.

[0910] B16/Db-hmgp100 cells were kindly provided by Dr. Hanada et al. (HHS agency) and were licensed from NIH. B16/Db-hmgp100 cells were generated by double transduction of B16F10 with H-2Db and a retrovirus that encodes chimeric mouse gp100 that is comprised of the human gp10025-33 and the rest of mouse gp100. Cells were cultured in RPMI 1640 (Biological Industries, 01-100-1A) with 10% FBS (Biological Industries, 04-127-1A), and 100 g/mL penicillin/streptomycin (Biological Industries, 03-031-1B), 1% Glutamax (Life technologies, 35050-038), 1% Sodium pyruvate (Biological Industries, 03-042-1B), 0.01% 2-mercaptoethanol (Life technologies, 31350-010), 10 μg/ml Blasticidin (InvivoGen, ant-bl-05). 1×10⁵ B16/Db-hmgp100 cells subcutaneously into the back right flank of mice.

[0911] In both CT26 and B16/Db-hmgp100 models mAb administration started at day 4 (mono treatment) or day 7 post tumor inoculation when tumors were at volume of 30-50 mm³ (combo treatment); and was given intra-peritoneal (i.p.) in a final volume/injection of 200 μl, for 3 wks for a total of 6 administrations. Tumor growth was measured with electronic caliper every 2-3 days and was reported as 0.5×W²×L mm³. Mice were sacrificed with CO₂ at either study termination or any of the following clinical endpoints: tumor volume >1800 mm³, tumor ulceration, body weight loss >20%, or moribund appearance.

[0912] MC380VA^{dim} cells (clone UC10 4H10) were received from the Peter MacCallum cancer center. Cells were grown in DMEM or RPMI media containing 10% FBS, 1% Glutamax, 1% Sodium pyruvate, 0.01% 2-mercaptoethanol, 1% Penicillin-Streptomycin, 1% HEPES, 1% NEAA. MC380VA^{dim} cells (10⁶ or 1.2×10⁶) cells in 50 μl/mouse were injected subcutaneously into the right flank of the mouse. At a tumor volume of 130-260 mm3 mice were randomly assigned into treatment groups. Mice were treated with 15 mg/kg Synagis isotype control or with AB-837 mAbs injected twice a week for a total of 6 treatments. Tumor growth was measured with an electronic caliper every 2-3 days and was reported as 0.5×W²×L mm³. The experimental endpoint is defined at tumor volume of 1800 mm³. Mice with body weight loss of above 10% between measurements, or 20% reduction from initial weight were excluded.

[0913] E0771 murine TNBC model was purchased from CH3 BioSystems (Product: #94A001). Cells were cultured in RPMI 1640 (Biological Industries, 01-100-1A) with 10% FBS (Biological Industries, 04-127-1A), and 100 μg/mL penicillin/streptomycin (Biological Industries, 03-031-1B). For tumor implantation, cells were harvested and washed, counted, and suspended to 10⁷ cells/ml in cold RPMI 1640 and placed on ice. C57BL/6 mice ((female, 8 wk) Envigo), were anesthetized with 10% Ketamine (Clorketam; SAGARPA Q-7090-053) and 10% Xylazine (Sedaxylan; BE-V254834) mixture injected intraperitoneally. Next, tumor cells were injected with mixture containing 50 μl of 5×10⁵ E0771 cells and 50 μl of Matrigel Matrix (Corning; 354234), orthotopically into the right third mammary fat pad of C57BL/6 mice. At tumor volume of 330 mm³, mice were randomly assigned into treatment groups of n=10. Mice were treated with 15 mg/kg Synagis D265A isotype control, AB-837 mIgG1-D265A and combination with anti-PD-L1. The mAbs were injected twice a week for a total of 6 treatments. Tumor growth was measured with an electronic caliper every 2-3 days and was reported as 0.5×W2×L mm3. The experimental endpoint is defined at tumor volume of 1800 mm³. Mice with body weight loss of above 10% between measurements, or 20% reduction from initial weight were excluded.

### Antibodies:

[0914] The phage display anti-mouse IL18-BP mAb (AbD35328) used in this study, engineered as a mouse IgG1 D265A isotype monoclonal antibody (mAb) was shown to bind to IL18-BP in ELISA assay and block binding of mIL-18 to IL18-BP. The anti-mouse PD-L1 inhibitor, on a mIgG1 backbone, used in this study was mAb YW243.55.570 which was described in WO 2010/077634 (heavy and light chain variable region sequences shown in SEQ ID NOs: 20 and 21, respectively, of WO 2010/077634), having a sequence disclosed therein.

[0915] All mAbs were formulated in sterile PBS and were low in endotoxin (<0.05 EU/mg).

TABLE 4
Tested mAbs.

| | | |
|---|---|---|
| 1 | Mouse IgG1 | |
| 2 | Mouse IgG1 D265A | |
| 3 | Benchmark anti PD-L1(mIgG1) | YW243.55.S70 |
| 4 | Anti-IL 18-BP mAb Mouse IgG1 D265A | AbD35328 |
| 5. | Anti PVRIG mAb 407 mAb mouse IgG1 | BOJ-5G4-F4 |
| 6. | Anti TIGIT mAb mouse IgG1 | CPA.9.086 M1 |

### Study Design for CT26 and B16/db-Hmgp100 Models

### Mono Treatment

[0916] Six-eight weeks old female BALB/c (for CT26) or C57BL/6 (for B16/Db-hmgp100 and E0771) mice were purchased from Envigo and acclimated in SPF animal facility for 1 week prior to beginning the experiment. Mice were anesthetized, shaved and inoculated subcutaneously with 50 μl of 2.5×105 CT26 or 1×105 B16/Db-hmgp100 or 5×105 E0771 cells tumor cells.

[0917] At day 4 post tumor inoculation mice were treated with mAbs (as detailed below) injected on day 4, 7, 11, 14, 18 and 21 post inoculation. Tumor growth was measured with caliper every 2-3 days.

TABLE 5
Treatment groups.

| # | | Dose | # | Vol/Dose |
|---|---|---|---|---|
| Group | Treatment/mAb | (mg/Kg) | Dose | (ul) |
| 1 | mIgG1 iso Ctrl | 5 | 6 | 200 |
| 2 | mIgG1-D265A iso Ctrl | 15 | 6 | 200 |
| 3 | Anti-PD-L1 mIgG1 | 5 | 6 | 200 |
| 4 | Anti-IL18-BP mAb mIgG1 D265A | 15 | 6 | 200 |
| 5 | Anti-TIGIT mAb mIgG1 | 10 | 6 | 200 |
| 6 | Anti-PVRIG 407 mAb mIgG1 | 10 | 6 | 200 |

### Combo Treatment

[0918] For combination of anti-IL18-BP with anti-mPD-L1 mAbs treatments, at day 7 post tumor inoculation, mice were randomly assigned into treatment groups of n=10 as described below. Mice were treated with mAbs (as detailed below) injected on day 7, 11, 14, 18, 21 and 25 post tumor inoculation. For combination of anti-IL18-BP with anti-TIGIT or anti-PVRIG the administration of anti-IL18-BP, anti-PVRIG, anti-TIGIT and control Synagis mIgG1-D265A (anti-IL18-BP) and mIgG1 (anti-PVRIG, anti-TIGIT), initiated on day 4 post inoculation. Mice were treated with mAbs (as detailed below) injected on days 4, 7, 11, 14, 18 and 21 post inoculation.

TABLE 6
Treatment dosages.

| # | | Dose | | Dose | | Vol/Dose |
|---|---|---|---|---|---|---|
| Group | Treatment/mAb 1 | (mg/Kg) | Treatment/mAb 2 | (mg/Kg) | # Dose | (μl) |
| 1 | mIgG1 iso Ctrl | 5 | mIgG1 D265A iso | 15 | 6 | 200 |
| | | | Ctrl | | | |
| 2 | Anti-PD-L1 | 5 | mIgG1 D265Aiso | 15 | 6 | 200 |
| | mIgG1 | | Ctrl | | | |
| 3 | Anti-PD-L1 | 5 | Anti-IL18-BP mAb | 15 | 6 | 200 |
| | mIgG1 | | mIgG1 D265A | | | |
| 4 | Anti-TIGIT mAb | 10 | Anti-IL18-BP mAb | 15 | 6 | 200 |
| | mIgG1 | | mIgG1 D265A | | | |
| 5 | Anti-PVRIG 407 | 10 | Anti-IL18-BP mAb | 15 | 6 | 200 |
| | mAb mIgG1 | | mIgG1 D265A | | | |

### Study Design for E0771 Model

[0919] At tumor volume of 330 mm3, mice were randomly assigned into treatment groups of n=10. Mice were treated with 15 mg/kg Synagis D265A, 837 mIgG1-D265A and combination with anti-PD-L1, mAbs injected twice a week for a total of 6 treatments.

TABLE 7
Treatment groups.

| # | | Dose | # | Vol/Dose |
|---|---|---|---|---|
| Group | Treatment/mAb | (mg/Kg) | Dose | (ul) |
| 1 | mIgG1 isotype control | 5 | 6 | 200 |
| 2 | mIgG1-D265A isotype control | 15 | 6 | 200 |
| 3 | Anti-PD-L1 mIgG1 | 5 | 6 | 200 |
| 4 | Anti-IL18-BP mAb mIgG1 D265A | 15 | 6 | 200 |

TABLE 8
Treatment dosages.

| # | | Dose | | Dose | | Vol/Dose |
|---|---|---|---|---|---|---|
| Group | Treatment/mAb 1 | (mg/Kg) | Treatment/mAb 2 | (mg/Kg) | # Dose | (μl) |
| 1 | mIgG1 isotype | 5 | mIgG1 D265A | 15 | 6 | 200 |
| | control | | isotype control | | | |
| 2 | Anti-PD-L1 | 5 | mIgG1 D265A | 15 | 6 | 200 |
| | mIgG1 | | isotype control | | | |
| 3 | Anti-PD-L1 | 5 | Anti-IL18-BP mAb | 15 | 6 | 200 |
| | mIgG1 | | mIgG1 D265A | | | |

### Statistical Analysis:

[0920] Two-way ANOVA with repeated measures, followed by two-way ANOVA with repeated measures for selected pairs of groups using JMP (Statistical Discoveries™) software. Analyses of tumor growth measurements were performed by comparing tumor volumes measured on the last day on which all study animals were alive. Statistical differences in percentage of mice tumor free were determined by a Log Rank Mantel-Cox test. Values of P<0.05 were considered significant. * p<0.05; ** p<0.01; *** p<0.001. For each experiment, the number of replicates performed and the number of animals per group are described in the corresponding figure legend(s).

### Results

### Monotherapy Activity of Anti-IL18-BP and Anti-mPD-L1 in Syngeneic CT26 Mouse Tumor Model

[0921] The effect of anti-IL18-BP monotherapy in mouse syngeneic CT26 tumor model was assessed and compared to monotherapy with anti-mPDL1. Mice were treated with isotype control antibody (mIgG1 or mIgG1 D265A), or with anti-PD-L1 mIgG1 antibody (YW243.55.570) or mIgG1 D265A anti-IL18-BP (mAb AbD35328).

[0922] In a semi-therapeutic treatment model of CT26 colon carcinoma, monotherapy with anti-PD-L1 resulted in tumor growth rates similar to treatment with mIgG1 isotype control, albeit with a statistically significant benefit to mice survival. Mice in group treated with anti-IL18-BP mAb as a monotherapy, showed similar tumor growth rates to mice treated with mIgG1 D265A isotype control without survival benefit (FIG. 22).

### Activity of Anti-IL18-BP and Anti-PD-L1 Combination in Syngeneic CT26 Mouse Tumor Model

[0923] Next, the efficacy of anti-IL18-BP and anti-PD-L1 combination therapy in mouse syngeneic tumor model was assessed.

[0924] In a therapeutic treatment model of CT26 colon carcinoma, administration of anti-PD-L1 with control mIgG1 D265A isotype treatment, initiated on day 7 post inoculation, did not affect tumor growth, while combination of anti-IL18-BP mAb with anti-PD-L1 elicited significant TGI (52%, P=0.03, FIG. 22), higher rates of response with 4 out of 10 individuals demonstrating tumor volumes below 200 mm³ translated into a statistically significant benefit of mouse survival (P<0.05, FIG. 22) and promoted increased and durable antitumor activity.

### Monotherapy Activity of Anti-IL18-BP in MC380VA^{dim} Mouse Tumor Model

[0925] To validate the anti-tumor activity of anti-mouse IL18BP, AB-837, as a single agent, mice inoculated with MC380VA^{dim} tumor cells were administered with 15 mg/kg of AB-837 or isotype control. Monotherapy with AB-837 resulted in a 58% TGI (p<0.005, FIG. 78A).

### Monotherapy Activity of Anti-IL18-BP and Anti-mPD-L1 in Syngeneic B16/db-Hmgp100 Mouse Tumor Model

[0926] We further explored the anti-tumor activity of AB-837 in a less immune infiltrated mouse melanoma tumor model B16/Db-hmgp100 either as monotherapy or in combination with anti PD-L1 Ab.

[0927] Mice were treated with isotype control antibody (mIgG1 or mIgG1 D265A), or with anti-PD-L1 mIgG1 antibody (YW243.55.570) or mIgG1 D265A anti-IL18-BP (mAb AbD35328).

[0928] In a B16/Db-hmgp100 melanoma tumor model, monotherapy with anti-PD-L1 resulted in tumor growth rates similar to treatment with mIgG1 isotype control, without benefit to mice survival. Mice in group treated with anti-IL18-BP mAb as a monotherapy, showed 31.4% tumor growth inhibition compared to mIgG1 D265A isotype control, with a trend to statistical significance (p=0.09, FIG. 23). In additional experiment treatment with anti-IL18-BP mAb resulted in 54% TGI ((p<0.005, FIG. 78B).

### Activity of Anti-IL18-BP and Anti-PD-L1 Combination in Syngeneic B16/db-Hmgp100 Mouse Tumor Model

[0929] Next, the activity of anti-IL18-BP and anti-PD-L1 combination therapy in B16/Db-hmgp100 mouse syngeneic tumor model was assessed.

[0930] In of B16/Db-hmgp100 melanoma tumor model, administration of anti-PD-L1 with control mIgG1 D265A isotype control treatment, initiated on day 7 post inoculation, resulted in 30.8% tumor growth inhibition compared to mice treated with isotype control (P=0.07, FIG. 23). Whereas a combination of anti-IL18-BP mAb with anti-PD-L1 elicited 31.1% of TGI compared to anti-PD-L1 monotherapy, and a significant TGI (52%, P=0.0023), compared to mice treated with isotype control treatment (FIG. 23). Only mice treated with a combination of anti-IL18-BP mAb with anti-PD-L1 reached to statistically significant improvement in survival compared to control groups (P<0.05, FIG. 23).

### Activity of Anti-IL18-BP and Anti-TIGIT Combination in B16/db-Hmgp100 Syngeneic Mouse Tumor Model

[0931] Next, we assessed the activity of anti-IL18-BP and anti-TIGIT combination therapy in B16/Db-hmgp100 mouse syngeneic tumor model.

[0932] Mice treated with either anti-IL18-BP mAb or with ant-TIGIT mAb as monotherapies showed 34% (p=0.0594) and 43% TGI (p=0.0105) compared to mice treated with isotype control, respectively (FIG. 24). However, when mice were treated with a combination of anti-IL18-BP and anti-TIGIT mAbs, 35% and 24% TGI was exhibited compared to anti-IL18-BP and anti-TIGIT monotherapies, respectively. Moreover, these mice exhibited 57% (p=0.02, FIG. 24) TGI compared to group treated with isotype control mAbs. This effect was also translated into a significant improvement in mice survival (p=0.013, FIG. 24).

### Activity of Anti-IL18-BP and Anti-PVRIG Combination in B16/db-Hmgp100 Syngeneic Mouse Tumor Model

[0933] The activity of anti-IL18-BP and anti-PVRIG combination therapy in B16/Db-hmgp100 mouse syngeneic tumor model was also assessed.

[0934] While mice treated with anti-IL18-BP mAb monotherapy exhibited 34% (p=0.0594) TGI, mice treated with anti-PVRIG had a comparable tumor growth to mice treated with isotype control mAbs (FIG. 25). None of the monotherapies significantly improved mice survival. However, when mice were treated with a combination of anti-IL18-BP and anti-PVRIG mAbs, a statistically significant TGI was shown (44%, p=0.0034) compared to mice treated with isotype control, which further resulted in a significantly improved mice survival (p=0.0034) (FIG. 25).

Anti IL18-BP Activity as Monotherapy and in Combination with Anti-mPD-L1 in Orthotopic E0771 Mouse Tumor Model

[0935] Monotherapy with anti-mouse IL18 bp mAb, 837 mIgG1-D265A, in E0771 tumor bearing mice leads to 83% TGI (P<0.0001) compared to synagis D265A isotype control (FIG. 72). A combination treatment of 837 mIgG1-D265A with aPD-L1 results in potentiated response, with 61% TGI compared to AB-837 administration as a monotherapy (p=0.029) and 91% TGI compared to isotype control (FIG. 72, p<0.0001). These anti-tumor responses were translated into significant survival benefit: combination of 837 mIgG1-D265A with anti-PD-L1 significantly (P=0.004) increased the survival of mice compared to monotherapy with 837 mIgG1-D265A (P=0.01).

### Conclusions

[0936] The studies described in this example evaluated the in vivo anti-cancer efficacy of mAb directed against IL18-BP as a monotherapy or in combination with anti-PD-L1, anti-TIGIT or anti-PVRIG mAbs in 3 syngeneic mouse tumor models, CT26, B16/Db-hmgp100 and E0771.

[0937] In CT26 and B16/Db-hmgp100 tumor models, treatment with 15 mg/kg (300 pg/mouse) of anti-IL18-BP as a monotherapy in a minimal disease set-up, i.e., treatment initiation on day 4, resulted in increased TGI (0-35%) without a statistically significant survival advantage. However, when anti-IL18-BP mAbs were administered in combination with anti-PD-L1, anti-TIGIT or anti-PVRIG treatments, a synergism was exhibited by a statistically significant tumor growth inhibition and increased survival of mice.

[0938] In E0771 tumor model, treatment with 15 mg/kg (300 pg/mouse) of anti-IL18BP Ab as a monotherapy resulted in a significant anti-tumor activity (83% TGI) compared to control group. The activity of anti-IL-18BP Ab was further increased when it was administrated in combination with anti PD-L1 treatment.

[0939] In MC380VA^{dim} tumor model, treatment with 15 mg/kg (300 pg/mouse) of anti-IL18BP Ab as a monotherapy resulted in a significant anti-tumor activity (58% TGI) compared to control.

[0940] An in vivo effect of combining anti-IL18-BP with anti-mPD-L1 treatment was also demonstrated in MC38ova (data not shown).

### Example 18: Monotherapy with Anti-IL18BP Mab Induces Immunogenic Memory in E0771 Tumor Model

[0941] This example describes the ability of anti IL18-BP Ab to induce immunogenic memory.

### Materials and Methods

### Tumor Challenge Experiments:

[0942] E0771 murine TNBC model was purchased from CH3 BioSystems (Product: #94A001). Cells were cultured in RPMI 1640 (Biological Industries, 01-100-1A) with 10% FBS (Biological Industries, 04-127-1A), and 100 μg/mL penicillin/streptomycin (Biological Industries, 03-031-1B). For tumor implantation, cells were harvested and washed, counted, and suspended to 10⁷ cells/ml in cold RPMI 1640 and placed in ice. C57BL/6 mice ((female, 8 wk) Envigo), were anesthetized with 10% Ketamine (Clorketam; SAGARPA Q-7090-053) and 10% Xylazine (Sedaxylan; BE-V254834) mixture injected intraperitoneally. Next, tumor cells were injected in mixture containing 50 μl of 5×10⁵ E0771 cells and 50 μl of Matrigel Matrix (Corning; 354234), orthotopically into the right third mammary fat pad of C57BL/6 mice. The administration of mAbs started at day 11 post tumor inoculation when tumors were at volume of 270 mm³; and was given intra-peritoneal (i.p.) in a final volume/injection of 200 μl, for 3 weeks for a total of 6 administrations. Tumor growth was measured with electronic caliper every 2-3 days and was reported as 0.5×W2×L mm3. Mice were sacrificed with C02 at either study termination or any of the following clinical endpoints: tumor volume >1800 mm³, tumor ulceration, body weight loss >20%, or moribund appearance.

### Tumor Re-Challenge Experiments:

[0943] For tumor re-challenge experiments, ninety days after primary E0771 inoculation, mice treated with anti-mouse IL18-BP mAbs and rejected primary tumors, and naïve age-matched female C57BL/6 mice, were re-challenged with 5×10⁵ E0771 cells in the left third mammary fat pad (FIG. 27A). Tumor growth was monitored as described above.

### Results:

### Monotherapy Activity of Anti-IL18-BP and Anti-mPD-L1 in Syngeneic E0771 Orthotopic Mouse Tumor Model

[0944] In E0771 tumor model mice were treated with a anti-PD-L1 mIgG1 antibody (YW243.55.570) or with anti-IL18-BP mIgG1 D265A antibody (mAb AbD35328).

[0945] In orthotopic E0771 TNBC model, monotherapy with anti-PD-L1 resulted in tumor growth inhibition of 38.2% (p=0.72) compared to treatment with mIgG1 isotype control, with a benefit to mice survival (p=0.0362). Mice in group treated with anti-IL18-BP mAb as a monotherapy, showed 94.2% (p=0.0113) tumor growth inhibition compared to mIgG1 D265A isotype control (FIG. 26). This anti-tumor response was translated into a statistically significant survival benefit (p=0.0011, FIG. 26). A tumor growth inhibition of 81.6% was detected when comparing the therapeutic effects of anti-IL18-BP with the effects of anti-PD-L1.

### E0771 Orthotopic Tumor Re-Challenge Model to Assess Generation of Immune Memory

[0946] Since monotherapy with anti IL18-BP mAb induced a complete rejection of E0771 tumors in mice, we examined whether the treatment induces generation of immunological memory by re-challenging mice without evident residual tumors (complete responders). Mice were treated with 15 mg/kg anti IL18-BP Ab or isotype control. Two months after primary tumor inoculation, mice with no evident residual tumors and tumor-naïve aged-matched mice were re-inoculated with 5×10⁵ E0771 tumor cells. Five out of ten tumor-naïve mice had tumor progression, while none of the mice completely rejecting primary tumors (5/5) developed tumors (FIGS. 27A, B and C). In an additional experiment, 8/9 re-challenged mice rejected the tumors, in contrast to 1/9 tumor-naïve mice. Spleen weight was significantly increased in rechallenged mice compared to tumor-naïve (P=0.004, FIG. 27D). Moreover, we encountered a significant increase in percentage of CD44+CD62L-CD8+ effector T cells (22%, p=0.02, FIG. 5E) and CD19+ cells (20%, p=0.04, FIG. 27F) in rechallenged mice compared to tumor-naïve mice. No other statistically significant differences were detected. Overall, these results show that a systemic memory was induced by anti-IL18 bp monotherapy in mouse E0771 model.

### Example 19: Administration of Anti-IL18BP is Expected to have a Better Therapeutic Potential than Engineered IL-18

### Material and Methods:

### Mouse Antibodies and Recombinant Proteins

[0947] All mAbs and recombinant proteins were formulated in sterile PBS and were low in endotoxin (<0.05 EU/mg).

### Cell Culture:

[0948] Nine days pre-inoculum, vials of MC38ova^{dim} cells were thawed into RPMI media containing 10% FBS, 1% Glutamax, 1% Sodium pyruvate, 1% HEPES, 1% NEAA, 0.01% 2-mercaptoethanol, 1% Penicillin-Streptomycin. Following centrifugation at 300×g for 8 min, cell pellet was resuspended, counted and seeded in a T175 flask. On days −7, −5 and −2, the cells were detached and re-seeded at 6-8*10⁶ cells/T175 flask. On the day of inoculum, the cells were detached, centrifuged at 300×g for 10 min, filtered through 40 μM cell strainer and resuspended in RPMI.

### Inoculation of Mice:

[0949] Experiments were performed in C57Bl/6 (female, 6-8 wk, Envigo). Mice were anesthetized with 10% Ketamine and 10% Xylazine mixture injected intraperitoneal. Next, mice were inoculated with MC38ova cells (1.2×10⁶) subcutaneously to the right flank in 50 μl/mice. Tumor growth was measured with an electronic caliper every 2-3 days and was reported as 0.5×W²×L mm³.

Administration of Anti-mIL18BP and Engineered mIL-18 to Tumor-Bearing Mice:

[0950] At tumor volume of −120 mm³ (day 9), mice were randomly assigned into treatment groups. Mice were treated with Synagis mouse IgG1, k isotype control 15 mg/kg (IP), anti-mIL18 bp 837 mIgG1 15 mg/kg (IP), PBS (SC), or engineered IL-18 (SC) 0.32 mg/kg. Treatments were injected twice a week for a total of 6 treatments. Tumor growth was measured with caliper every 2-3 days. Mice were weighed every week. Mice were bled before the 4th treatment, 4 hours after the 4th treatment, and 24 hours after the 4th treatment. Serum was analyzed for presence of IFNg, TNFα, MCP1, IL6 by Cytometric Bead Array (CBA) Mouse Inflammation Kit (BD Cat. No. 552364). Spleens were harvested from mice 24 hours after the 4th treatment and weighed. For IL15 experiments, mice were treated with a single dose of 0.5 μg, 1.5 μg of IL15, or with a mix of 0.5 μg IL15 and 2.33 μg IL15R.

### Spleen Processing and FACS Analysis:

[0951] Spleens were crushed into 40 μm filters and red blood cells were lysed. Single-cell suspensions were seeded into a 96-well V-bottomed plate. Cells were labeled for viability and dead cells were excluded using the Fixable Viability Stain 450 (BD Bioscience Cat #562247). To block Fcγ receptors, cells were incubated with 10 μg/mL of Purified Rat Anti-Mouse CD16/CD32 (Mouse BD Fc Block™, BD Bioscience Cat #553142) in cold 1×PBS buffer for 10 minutes. Various immune populations were stained with anti-mouse antibodies (Table 17). After washing (1% BSA, 0.1% sodium azide, in PBS), cells were acquired on FACS Fortessa cytometer (BD Bioscience). Analysis was done using FlowJo. Gating markers are shown in Table 18.

TABLE 17
FACS Panels.

| | Marker | Fluorophore | Vendor | Cat# | Clone |
|---|---|---|---|---|---|
| Lymphoid | Viability | 450 | BD Bioscience | 562247 | |
| | CD45 | BV605 | Biolegend | 103140 | 30-F11 |
| | CD3ε | BUV395 | Biolegend | 563565 | 145-2C11 |
| | CD4 | BV785 | Biolegend | 100453 | GK1.5 |
| | CD8a | PE/Cy7 | Biolegend | 100722 | 53-6.7 |
| | CD19 | PerCP/Cy5.5 | Biolegend | 115534 | 6D5 |
| | NK1.1 | FITC | Biolegend | 108706 | PK136 |
| | CD107a | APC/Cy7 | Biolegend | 121616 | 1D4B |
| | CD69 | BV510 | Biolegend | 104532 | H1.2F3 |
| | IL18Ra | AF647 | Biolegend | 157908 | A17071D |

TABLE 18
Gating markers.

| Cell subset name | Gating markers |
|---|---|
| Immune Cells | CD45⁺ |
| T cells | CD45⁺CD3⁺ |
| CD4⁺ T cells | CD45⁺CD3⁺CD4⁺ |
| CD8⁺ T cells | CD45⁺CD3⁺CD8⁺ |
| NK | CD45⁺NK1.1⁺ |
| NKT | CD45⁺NK1.1⁺CD3+ |
| B Cells | CD45⁺CD19⁺ |

[0952] Engineered IL-18, also referred to as DR-18, and mCS2 in US Patent Publication No. 20190070262A1 (listed as SEQ ID NO: 61 in US 2019/0070262 A1) was shown not to bind IL18-BP. The sequence of DR-18 is shown below:

(SEQ ID NO: 1920)
HFGRLHCTTAVIRNINDQVLFVDKRQPVFEDMTDIDQSASEPQTRLIIYA
YGDSRARGKAVTLSVKDSKMSTLSCKNKIISFEEMDPPENIDDIQSDLIF
FQKRVPGHNKMEFESSLYEGHFLACQKEDDAFKLILKKKDENGDKSVMFT
LTNLHQSHHHHHH

### Results:

Analysis of MC38ovadom Tumor-Bearing Mice Treated with Anti-mIL18 bp and Engineered mIL-18:

[0953] When treating mice with anti-mIL18 bp, no loss of weight was observed, similar to control group (FIG. 73A). When analyzing blood serum from mice treated with anti-mIL18 bp, no increase in inflammatory cytokines IFNg, TNFα, MCP1 and IL6 was observed. In contrast, mice treated with engineered mIL-18 had elevated serum levels of IFNg, TNFα, MCP1 and IL6, 4 hours after the 4th treatment, and elevated serum levels of IFNg 24 hours after the 4th treatment (FIG. 73B). Mice treated with engineered mIL-18 had very high serum levels of IL18 (method of IL18 detection identifies also engineered IL18), 4 hours after the 4th treatment, which returned to baseline by 24 hours after the 4th treatment (FIG. 73C). Spleens harvested from mice 24 hours after the 4th treatment of anti-mIL18 bp were similar to spleens harvested from mice in control groups, while spleens harvested from mice treated with engineered mIL-18 were larger by an average of 4.9 folds compared to control (FIG. 73D). Similarly, spleens harvested from mice treated with varying concentrations of IL-15 were larger than controls (FIG. 73E).

Immune Composition of Spleens from Treated Mice

[0954] When analyzing cells from spleens harvested from treated mice, we observed that mice administered with engineered mIL-18 had larger number of CD45+ immune cells, as well as CD3+ T cells and CD19+B cells, compared to control mice. In contrast, spleens from mice treated with anti-mIL18 bp Ab had a subtle reduction in these cell populations (FIG. 73F). We also detected an increase in the expression of IL18Ra on splenic CD8+, CD4+ T cells, NK and NKT cells (FIG. 73G). When examining activation state of lymphoid cells, spleens from mice treated with engineered mIL-18 had significantly more CD69+CD4+ T-cells, CD69+CD8 T-cells, CD69+B Cells, CD107+NK cells, and CD69+CD107+ NKT cells, compared to control mice. Additionally, the expression of activation markers was pronouncedly increased by engineered mIL-18, compared to control. In contrast to engineered IL18, treatment with anti-IL18 bp Ab did not increase activation state of splenic lymphocytes compared to isotype control. (FIGS. 73H-I).

### Example 20: Anti-IL-18BP Antibody Modulates Tumor Microenvironment without Effecting Periphery in Murine Tumor Model

[0955] To further understand the effects of mouse anti-IL-18BP Ab on the tumor microenvironment and immune periphery, we studied the immune composition of tumors isolated from mice treated with AB-837 monotherapy, compared to control group treated with isotype control in MC380VA^{dim} tumors.

### Material and Methods:

### Mouse Antibodies and Recombinant Proteins

[0956] All mAbs and recombinant proteins were formulated in sterile PBS and were low in endotoxin (<0.05 EU/mg).

### Cell Culture

[0957] Nine days pre-inoculum, vials of MC380VA^{dim} cells were thawed into RPMI media containing 10% FBS, 1% Glutamax, 1% Sodium pyruvate, 1% HEPES, 1% NEAA, 0.01% 2-mercaptoethanol, 1% Penicillin-Streptomycin. Following centrifugation at 300×g for 8 min, cell pellet was resuspended, counted, and seeded in a T175 flask. On days −7, −5 and −2, the cells were detached and re-seeded at 6-8*10⁶ cells/T175 flask. On the day of inoculum, the cells were detached, centrifuged at 300×g for 10 min, filtered through 40 pM cell strainer and resuspended in RPMI.

### Inoculation of Mice

[0958] C57Bl/6 mice (female, 6-8 wk, Envigo) were anesthetized with 10% Ketamine and 10% Xylazine mixture injected intraperitoneal. Next, mice were inoculated with MC380VA^{dim} cells (1.2×10⁶) subcutaneously to the right flank in 50 μl/mice. Tumor growth was measured with an electronic caliper every 2-3 days and was reported as 0.5×W²×L mm³.

### Administration of Anti-mIL18BP to Tumor-Bearing Mice

[0959] At tumor volume of ˜120 mm³ (day 9), mice were randomly assigned into treatment groups. Mice were treated with synagis mouse IgG1, k isotype control 15 mg/kg (IP), anti-mIL18 bp 837 mIgG1 15 mg/kg (IP). Treatments were inoculated twice a week for a total of 4 treatments. Tumor growth was measured with caliper every 2-3 days. Mice were weighed every week. Mice were bled before the 4^{th} treatment, 4 hours after the 4^{th} treatment, 24 and 48 hours after the 4^{th} treatment. Serum was analyzed for levels of IL-18 by ELISA (MBL Cat. No. 7625) and IL18 bp (in-house ELISA). Tumors were harvested from mice 24 hours after the 4^{th} treatment.

### Tumor Immune Phenotyping of MC380VA^{dim} Tumor Microenvironment

[0960] Mice were inoculated with MC380VA^{dim} and treated with anti-mouse IL-18BP Ab or isotype control twice a week. Tumors, spleens and serum were collected. Tumor samples were dissected into small pieces and transferred to GentleMACs™ C tubes (Miltenyi Biotec) containing an enzyme mix using human tumor Dissociation Kit (Miltenyi Biotec), as per the manufacturer's protocol. After dissociation, samples were centrifuged at 300 g for 8 minutes and supernatants were collected. Cells were filtered through a 70 m filter. Single-cell suspensions were seeded into a 96-well V-bottomed plate. Cells were labeled for viability and dead cells were excluded using the Zombie Aqua viability dye (BioLegend). To block Fcγ receptors, cells were incubated with 10 μg/mL of anti-CD16 and anti-CD32 antibodies (BD Bioscience) in cold 1×PBS buffer for 10 minutes. Various immune populations were stained with anti-mouse antibodies (see Table 9). For cytokine staining, cells were stimulated with 50 ng/ml PMA, 1 μg/ml ionomycin and BFA. Then, cells were stained extracellularly for membrane markers and intracellularly for cytokine expression. Cells were acquired on FACS Fortessa cytometer (BD Bioscience). Analysis was done using FlowJo. Collected supernatants were centrifuged at 3130 g for 10 minutes. Following centrifugation, supernatants were recollected. Tumor supernatants and serum were analyzed for presence of IFNg by Cytometric Bead Array (CBA) Mouse Inflammation Kit (BD Cat. No. 552364).

TABLE 9
FACS staining panels to identify different immune cell types
for immune phenotyping in MC380v^{adim} tumor model.

| | Marker | Fluorophore | Vendor |
|---|---|---|---|
| Lymphoid | Live/dead | BV510 | |
| | CD45 | BV605 | Biolegend |
| | CD3 | BV421 | Biolegend |
| | CD4 | BV785 | Biolegend |
| | CD8 | PE-Cy7 | Biolegend |
| | CD19 | PercpCy5.5 | Biolegend |
| | NK1.1 | FITC | Biolegend |
| | CD44 | PE | Biolegend |
| | CD62L | APC | Biolegend |
| Myeloid | Live/dead | BV510 | |
| | CD45 (Rat IgG2b, κ) | BV605 | Biolegend |
| | CD11b(Rat 2b, κ) | PB | Biolegend |
| | Ly6C | APC-Cy7 | Biolegend |
| | Ly6G | BV785 | Biolegend |
| | F4/80 | AF488 | Bio-Rad |
| | CD11c | Percp-cy5.5 | Biolegend |
| | I-A/I-E | APC | Biolegend |
| | CD24 | AF700 | Biolegend |
| | CD103 | PE-cy7 | Biolegend |
| Cytokines | Live/dead | BV510 | |
| | CD45 | BV605 | Biolegend |
| | CD3 | BV421 | Biolegend |
| | CD4 | BUV395 | BD |
| | CD8 | BV785 | Biolegend |
| | CD49b | PerCP/Cy5.5 | Biolegend |
| | IFNg | AF488 | Biolegend |
| | TNFa | PE/cy7 | Biolegend |
| | IL2 | PE | Biolegend |

### Results:

[0961] When treating mice with anti-mouse IL18BP, a tumor growth inhibition of 41.1% was observed after 4 treatments (FIG. 74). To assess the immune composition, tumors and spleens were harvested as described in materials and methods, single cells suspensions were generated, and cells were stained with panels of antibodies as described in Table 9. Tumor supernatants and blood serum were collected and analyzed for cytokine concentrations. Monotherapy of anti-IL-18BP Ab resulted in increased numbers of CD3+(+100%, p=0.007) and CD8+(+85%, p=0.0087) T cells in the TME (FIG. 75A-C). This therapy also induced increased concentrations of IFNg+(+76%, p=0.0519) in tumor supernatants (FIG. 75D). When inspecting activation markers, there was a significant increase in CD8+CD69+CD107+(+168%, p=0.0005) T cells (FIG. 75E), as well as CD107+(+54%, p=0.0094) NK cells (FIG. 75F). In the myeloid compartment, there was a significant increase in numbers of DC cells (+136%, p=0.0017), as well as in MHC-II (+40%, p=0.0138) expression on them (FIG. 75G), indicating on potentially increased capacity to prime T cells. When inspecting similar parameters in spleens or serum of AB-837-treated animals, no immune activation was observed. Only minor effects were detected—a slight decrease in NK cells, macrophages and neutrophiles, an increase in CD69 expression on NK cells, and a decrease in mIL18Ra expression on NK cells (FIG. 75H). IFNg, TNFα, IL-6, IL-10 and MCP-1 were not detected in the serum of mice treated with anti-IL-18BP Ab or with isotype control (FIG. 75I). In summary, monotherapy with AB-837 induced robust TME-constrained immune modulation, without peripheral immune activation.

### Example 21: Efficacy of Anti IL-18BP Ab in Combination with Chemotherapy

### Methods

### Antibody and Oxaliplatin Administration

[0962] C57Bl/6 mice (female, 6-8 wk, Envigo), were subcutaneously inoculated with 1.2×10⁶ MC380VA^{dim} mouse tumor cells in 50 μl/mouse into the right flank. Tumor growth was measured with an electronic caliper every 2-3 days and was reported as 0.5×W²×L mm³. The experimental endpoint is defined at tumor volume of 1800 mm³. Mice with body weight loss of above 10% between measurements, or 20% reduction from initial weight were excluded.

[0963] At a tumor volume of 110 mm³ mice were randomly assigned into two treatment groups: group administered with 5 mg/kg oxaliplatin (Sigma-Aldrich, Cat. 09512) or control group administered with DDW. When tumors reached volume of 140 mm³, mice in each group were assigned into two separate groups: group treated with 15 mg/kg anti-mouse IL18 bp antibody or isotype control. Antibodies were injected twice a week for a total of 6 treatments (see Table 10 for details).

TABLE 10
Experimental treatment groups.

| | | Ab Dose | Oxaliplatin Dose | |
|---|---|---|---|---|
| Group | Ab | (mg/kg) | (mg/kg) | N |
| 1 | DDW + Synagis mIgG1 | 15 | 0 | 10 |
| 2 | DDW + anti-IL18bp | 15 | 0 | 10 |
| | mIgG1 | | | |
| 3 | Oxaliplatin + Synagis | 15 | 5 | 10 |
| | mIgG1 | | | |
| 4 | Oxaliplatin + anti- | 15 | 5 | 10 |
| | IL18bp mIgG1 | | | |

### Results

### Combination of Oxaliplatin and Anti-IL18BP Antibody Results in Synergistic Effects in MC38ova Tumor Model

[0964] To study the effects of combining anti-IL18 bp mAb with oxaliplatin in MC38ova^{dim} mouse tumor model mice were assigned to groups as described in table 10. As shown in FIG. 77, administration of combined therapy resulted in a synergistic anti-tumor responses compared to monotherapy with single agents. A combination therapy with oxaliplatin and anti-IL-18BP mAb resulted in 72% TGI (p<0.0001) compared to oxaliplatin monotherapy and 42% TGI (p=0.24) compared to anti-IL-18 bp mAb monotherapy.

### Example 22: The Immune Infiltrate Composition of E0771 Tumors is Altered by Monotherapy with Anti-IL-18Bp Antibody

[0965] To test the effects of anti-IL-18BP Ab monotherapy on the TME in another model, we studied the immune composition E0771 tumors by flow, scRNA sequencing and cytokines profiling.

### Material and Methods:

### Mouse Antibodies and Recombinant Proteins

[0966] All mAbs and recombinant proteins were formulated in sterile PBS and were low in endotoxin (<0.05 EU/mg).

### Cell Culture

[0967] E0771 murine TNBC model was purchased from CH3 BioSystems (Product: #94A001). Cells were cultured in RPMI 1640 (Biological Industries, 01-100-1A) with 10% FBS (Biological Industries, 04-127-1A), and 100 μg/mL penicillin/streptomycin (Biological Industries, 03-031-1B). For tumor implantation, cells were harvested and washed, counted, and suspended to 10\hat{ }7 cells/ml in cold RPMI 1640 and placed in ice.

### Inoculation of Mice

[0968] Experiments were performed in C57Bl/6 (female, 6-8 wk, Envigo). Mice were anesthetized with 10% Ketamine and 10% Xylazine mixture injected intraperitoneal. Next, mice were inoculated with E0771 cells (5*10\hat{ }5) orthotopically into the left mammary fat pad in a 1:1 mixture with Matrigel (Corning, CLS354234) in a volume of 100 μl. Tumor growth was measured with an electronic caliper every 2-3 days and was reported as 0.5×W²×L mm³.

### Administration of Anti-mIL18BP to Tumor-Bearing Mice

[0969] At tumor volume of −330 mm³, mice were randomly assigned into treatment groups. Mice were treated with Synagis Isotype Ctrl 10 mg/kg (IP) or anti-IL18BP 10 mg/kg (IP). Treatments were injected twice a week for a total of 3 treatments. Tumor growth was measured with caliper every 2-3 days. Mice were weighed once weekly. Tumors were harvested from mice 24 hours after the 3^{rd} treatment.

### Tumor Immune Phenotyping of E0771 Tumor Microenvironment

[0970] Mice were inoculated with E0771 and treated with anti-IL-18BP Ab or isotype control twice a week for three times. Tumor samples were dissected into small pieces and transferred to GentleMACs™ C tubes (Miltenyi Biotec) containing an enzyme mix using human tumor Dissociation Kit (Miltenyi Biotec), as per the manufacturer's protocol. After dissociation, samples were centrifuged at 300 g for 8 minutes and supernatants were collected. Cells were filtered through a 70 m filter. Single-cell suspensions were seeded into a 96-well V-bottomed plate. Cells were labeled for viability and dead cells were excluded using the Zombie Aqua viability dye (BioLegend). To block Fcγ receptors, cells were incubated with 10 g/mL of anti-CD16 and anti-CD32 antibodies (BD Bioscience) in cold 1×PBS buffer for 10 minutes. Various immune populations were stained with anti-mouse antibodies (see Table 11). For cytokine staining, cells were stimulated with 50 ng/ml PMA, 1 μg/ml ionomycin and BFA. Then, cells were stained extracellularly for membrane markers and intracellularly for cytokine expression. For FoxP3 detection, cells were fixed and permeabilized in FoxP3 buffer (Thermo Fisher) overnight at 4c, washed, and stained with intracellular anti-FoxP3 for 30 minutes on ice. After washing (1% BSA, 0.1% sodium azide, in PBS), cells were acquired on FACS Fortessa cytometer (BD Bioscience). Analysis was done using FlowJo. Collected supernatants were centrifuged at 3130 g for 10 minutes. Following centrifugation, supernatants were recollected. Tumor supernatants and serum were analyzed for presence of IFNγ by Cytometric Bead Array (CBA) Mouse Inflammation Kit (BD Cat. No. 552364).

TABLE 11
FACS staining panels: Different immune cell types for
immune phenotyping in E0771 mouse tumor models.

| | Marker | Fluorophore | Vendor |
|---|---|---|---|
| Lymphoid | Live/dead | BV510 | |
| | CD45 | BV605 | Biolegend |
| | CD3 | BV421 | Biolegend |
| | CD4 | BV785 | Biolegend |
| | CD8 | PE-Cy7 | Biolegend |
| | CD19 | PercpCy5.5 | Biolegend |
| | NK1.1 | FITC | Biolegend |
| | CD44 | PE | Biolegend |
| | CD62L | APC | Biolegend |
| Myeloid | Live/dead | BV510 | |
| | CD45 | BV605 | Biolegend |
| | CD11b | PB | Biolegend |
| | Ly6C | APC-Cy7 | Biolegend |
| | Ly6G | BV785 | Biolegend |
| | F4/80 | AF488 | Bio-Rad |
| | CD11c | Percp-cy5.5 | Biolegend |
| | I-A/I-E | APC | Biolegend |
| | CD24 | AF700 | Biolegend |
| | CD103 | PE-cy7 | Biolegend |
| T | Live/dead | BV510 | |
| regs | CD45 | BV605 | Biolegend |
| | CD3 | BV421 | Biolegend |
| | CD4 | BV785 | Biolegend |
| | CD25 | APC-Cy7 | Biolegend |
| Cytok. | Live/dead | BV510 | |
| | CD45 | BV605 | Biolegend |
| | CD3 | BV421 | Biolegend |
| | CD4 | BUV395 | BD |
| | CD8 | BV785 | Biolegend |
| | CD49b | PerCP/Cy5.5 | Biolegend |
| | IFNg | AF488 | Biolegend |
| | TNFa | PE/cy7 | Biolegend |
| | IL2 | PE | Biolegend |
| | Granzyme B | AF647 | Biolegend |

### Single Cell RNA-Seq

[0971] Mouse tumors were enzymatically dissociated to generate singe cell suspensions and Individual samples from each mouse were hashed using Total-seq-c antibodies (Biolegend). For each treatment, 6 mice were pooled together, and 40,000 cells were loaded into each channel of Chromium single-cell 5′ Chip to create a single cell GEM using the Chromium X machine. cDNA and the subsequent libraries were prepared according to the manufacturer's recommendations. Libraries from two 10× channels were pooled and sequenced together using Illumina NovaSeq S1.

### Single-Cell Gene Expression Analysis Preprocessing and QC

[0972] The CellRanger single-cell software suite (V7.0) pipeline from 10× genomics was utilized to identify cell hashing & VDJ features, and map reads to the reference transcriptome. Modified gene reference (based on GENCODE) was employed to align the reads, resulting in the generation of unique molecular identifier (UMI) count matrices. The data underwent downstream analyses using the scanpy package (V1.9.3) including quality control, clustering, cell annotation, and the identification of differentially expressed genes (DEGs).

[0973] The feature-barcode matrix obtained from 43615 cells was de-multiplexed using the scanpy implication of hashsolo. A total of 33,376 cells were recognized as singlets. Cell quality was further assessed utilizing the total UMI counts per cell, the number of detected genes per cell, and the proportion of mitochondrial gene counts. Cells of low quality, i.e. cells with less than 200 genes or more than 10% of expressed genes being mitochondrial gene were filtered out. Genes which were expressed in less than 3 cells were removed. Further analysis excluded cells co-expressing cell type-specific markers (doublets) such as Cd3e and Cd68 after which we remained with 28,366 cells. Some ambient RNA originating from highly abundant myeloid transcripts were noticed during preprocessing and were taken into account during downstream analysis. Using the cell barcodes, scRNA-seq data could be linked with the seTCR-seq data. Having noticed a high percentage of TCR negative T cells, additional quality control revealed some low-quality T cells (TCR negative, low ribosomal gene expression, high mitochondria expression) which were filtered out prior to downstream analysis. For further downstream analysis the remaining 25,713 cells were analyzed.

scRNA-Seq Clustering and Annotation

[0974] Feature counts were normalized to the median of total counts for observations (per cell) and natural-log transformation was applied. The scanpy function sc.find_variable_genes( ) in flavor ‘seurat’ was employed to identify highly variable genes (HVG) which were used in subsequent dimension reduction steps. The log-normalized data underwent scaling and Principal Component Analysis (PCA) was then conducted based on the expression matrix of the HVG, with the top 50 principal components (PCs) selected for graph-based clustering. Nearest neighbor detection with n=15 was computed followed by UMAP projections. The data underwent leiden clustering and major cell types were annotated based on conventional marker expression Monocytes & Marcophages (Cd68), DCs (Zbtb46), T-cells (Cd3e), Natural Killer (NK) cells (Ncr1), Neutrophils (S100a8), Stroma (Colla1) and B cells (Cd79a). For detailed cell type analysis, subset of major cell types was isolated and reset to its raw counts. Subsequently the same preprocessing pipeline as for the initial data was followed to reculaster the population.

### Results

### Flow Cytometry and Cytokine Analysis

[0975] Monotherapy of anti-IL-18BP Ab resulted in increased infiltration of CD45⁺ immune cells (47.8%, 0.03). In the lymphoid compartment, there was an increase in CD3 (108.5%, p=0.015), CD4⁺ (93.7%, p=0.014) and CD8⁺ T cells (108.3%, p=0.04) (FIG. 79A). Moreover, an increase in effector CD8⁺ T cells was detected (97.5%, ns) (FIG. 79B). This was further supported by the enhanced secretion of IFNγ⁺, IL2⁺ and granzyme B+ from CD8⁺ T cells, as well as by the induction in multi-functional granzyme B-LFNγ⁺CD8⁻ T cells (p>0.05) (FIG. 79C). Similarly, we detected an increased secretion of IL2 and TNFα from CD4⁺ T cells (p>0.05, FIG. 79D) and an induction in TNFα- and TNFα⁺IFNγ⁺-secreting NK cells (FIG. 79E). Similarly to MC1380VA^{dim}, but to a lesser extent, a trend for an increase in DCs, especially in DC2 was induced by anti-IL-18BP Ab (FIG. 79F). In accordance with the cell population analysis, we detected enhanced levels of IFNγ, TNFα and IL-12p70 in tumor supernatants (FIG. 79G). Interestingly, anti-IL-183P Ab increased the secretion of CXCL9, an IFNγ-regulated cytokine, supporting the greater T cell numbers in the TIME, and the IFNγ-induced response (FIG. 79H). Moreover, MIP-1α secretion was also induced by anti-IL-18BP Ab, potentially indicating on inflammatory reaction in the TME (FIG. 7911). There was a trend of increase in Tregs, however the CD8/Tregs ratio was also increased in anti-IL-18BP Ab treated animals compared to isotype control (data not shown). In summary, monotherapy with anti-IL-18BP Ab induced pronounced TME modulation.

scRNA Analysis

[0976] To further dissect, in high resolution, IL-18BP blockade effect on the TME, single cell (sc)RNA-sequencing (seq) of E0771 tumors was performed following treatment with anti-IL-18BP Ab. Major cell types were annotated based on conventional lineage markers (FIG. 80A). Anti-IL-181P treatment increased the fraction of T cells, with no major effects on other cell types (FIG. 80B) in line with flow cytometry results.

[0977] Subsetting and re-clustering of all T and NK cells, resulted in ten different T/NK clusters. Further examination of T cell subsets revealed reshaping of TME T cell populations following treatment (FIGS. 80C-80D). A significant increase in an effector polyfunctional CD8⁺ T cells population (expressing perforin, multiple granzymes and IFNγ) as well as proliferating CD8⁺ T cells was evident following treatment while frequency of naïve CD8 and CD4+ T cells populations were reduced (FIG. 80C). Importantly, exhausted T cells were not increased by the treatment (FIG. 80C).

[0978] All together these results are in line with the flow cytometry results indicate a shift in the T cell compartment from naïve T cells towards cytotoxic CD8 effector T cells.

[0979] Furthermore, TCR-seq analysis revealed that the increase in effector T cells following 1L-18BP blockade was also associated with increase in T cells clonal expansion (expansion above 3 cells per clone), suggesting a directed antigen-specific, potentially tumor-specific, immune response (FIG. 80E). Importantly, while as expected exhausted T cells were clonally expanded in the TME [1,2], GZMB-high and proliferating CD8⁺ T cells, expanded by treatment, exhibited the most pronounced clonal expansion among the various T cell (data not shown) subtypes suggesting an expansion of polyfunctional tumor-specific clones by the treatment.

[0980] Next, the monocyte and macrophage compartment was examined and nine myeloid and six DC populations subpopulations were identified (FIGS. 80F-801). IL-18BP blockade induced a significant increase of inflammatory MHCII^{high}C1qa+ and Nos2⁺ macrophages as well as a significant increase in activated DCs. Accordingly, a significant decrease in MHCII^{low}C1qa+ macrophages, suppressive Mrc1⁺ macrophages, Ifit⁺ MonoMacs and low-activated DCs was evident in treated mice (FIGS. 80F-80G)

[0981] This is in accordance with the increase in inflammatory myeloid cells, significant enhanced levels of inflammatory cytokines including IFNγ, TNFα, IL-12p70, CXCL9, MIP1a and a decrease in IL-1β in tumor supernatants were detected following IL-18BP blockade (FIGS. 79G-79H). Gene Set Enrichment Analysis (GSEA) of upregulated differentially expressed genes (DEGs) following anti-IL181P treatment showed a significant enrichment of genes in GO Biological process gene sets such as “Response to interferon gamma” and “Cellular response to cytokine stimulus.” In contrast, DEGs downregulated following the anti-IL18BP treatment group were significantly associated with gene sets like “cholesterol biosynthesis process” or “sterol biosynthesis process” (FIG. 80J). DEGs in DCs from anti-IL18BP treated samples were most significantly enriched in the gene set “Type 11 interferon signaling” (FIG. 80K). DEGs downregulated following the anti-IL18BP treatment group showed enrichment in gene sets such as “Cholesterol Biosynthesis Pathway” and “Mevalonate arm of cholesterol biosynthesis pathway”. Cholesterol Biosynthesis and mevalonate pathways in macrophages, monocytes and DCs were recently reported to be associated with an immunosuppressive and tolerogenic state of these cell types [3]. In summary, monotherapy with anti-IL-18BP Ab induced pronounced TME-localized modulation and anti-cancer immunity spanning multiple adaptive and innate immune cells.

### The Immune Cell-Dependence of Anti-Tumor Activity of Anti-Mouse IL18BP Monotherapy

[0982] To determine the contribution of particular immune cell populations to the effects of anti-mouse IL-18BP Ab on MC380VA^{dim} tumors, we performed antibody-mediated depletion studies.

### Method

[0983] Mice were assigned into 4 groups and were injected with anti-CD4 (GK1.5), anti-CD8 (Lyt 3.2), anti-NK1.1 (PK136) or isotype control prior to tumor inoculation (day −1), and on days 6, 13 and 20 for a total of 4 treatments. At tumor volume of 120 mm³, mice were randomly assigned into treatment groups and treated i.p. with anti-IL-18BP or with isotype control twice a week for a total of 6 treatments (see Table 12 for additional details).

TABLE 12
Depletion antibodies and monotherapy with anti-mouse
IL-18BP IgG1-D265A or Synagis mIgG1-D265A mAbs:
Mice were injected with depletion antibodies and 15 mg/kg
Synagis mIgG1-D265A or anti-IL-18BP mIgG1-D265A
antibodies were injected to groups of 10 mice (IP).

| | Antibody 1 | Dose | Antibody 2 | Dose | |
|---|---|---|---|---|---|
| Group | (depletion) | (μg) | (treatment) | (mg/kg) | n |
| 1 | PBS | | Synangis | | 9 |
| 2 | Isotype ab | 100 | D265A | 10 | 9 |
| | Rat IgG1 | | | | |
| 3 | Anti-CD4 (GK1.5) | 300 | | 10 | 10 |
| | B.B-Rat IgG2b | | | | |
| 4 | Anti-CD8 (Lyt 3.2) | 100 | | 10 | 8 |
| | B.B-Rat IgG1 | | | | |
| 5 | Anti-NK1.1 (PK136) | 50 | | 10 | 10 |
| | B.B-mIgG2a | | | | |
| 6 | PBS | | aIL-18BP | | 9 |
| 7 | Isotype ab | 100 | | 10 | 9 |
| | Rat IgG1 | | | | |
| 8 | Anti-CD4 (GK1.5) | 300 | | 10 | 10 |
| 9 | Anti-CD8 (Lyt 3.2) | 100 | | 10 | 8 |
| 10 | Anti-NK1.1 (PK136) | 50 | | 10 | 10 |

### Results

[0984] While the efficacy of IL-183P blockade was abrogated by the depletion of CD8⁺ T cells, with a minor effect on tumor volume (15.8% TGI, p=ns) and no effect on mice survival (FIG. 81A), the depletion of CD4⁺ T cells only partially abrogated anti-tumor effects of anti-IL-18BP Ab (35.6% TGI, p=0.0005) with a trend for improved survival, p=0.3, FIG. 3B). Moreover, the anti-tumor effects of anti-IL-18BP Ab were completely abolished on the background of NK cell depletion (FIG. 81C). It was concluded that in MC38OVA^{dim} tumor model the activity of IL18BP blockade depends on CD8 T cells and on NK cells.

### Functional Anti-IL18BP Ab Treatment Results in Immunoreactivity of Human Tumor-Derived Cell (TDCs) Samples

[0985] To test the effects of anti-IL-18BP Ab therapy in the presence of endogenous levels of IL18 and IL18BP, we studied the effect of Ab-71739 treatment on human TDCs.

### Material and Methods:

### Human Antibodies

[0986] All mAbs were formulated in sterile PBS and were low in endotoxin (<0.05 EU/mg). TDCs

[0987] Resected tumor specimens were cut into 1 mm pieces using scalpel and transferred into enzymatic digestion mix (Tumor Dissociation kit, Miltenyi, 130-095-929). Dissociation was done according to the manufacturer's instructions using gentle MACS Dissociator (Miltenyi Biotec). Dissociation time lasted 1 h under mechanical rotation and heating. Samples were centrifuged for 3 min at 300 g, pellet was resuspended in RPMI, passed through a MACS SmartStrainer (70 μm), and centrifuged for 7 min at 300 g. Cells were resuspended with RBC for 3 min, washed with RPMI 1640, transferred through 40 μm filter and centrifuged for 7 min at 300 g. Finally, cells were resuspended in PBS, stained with Trypan blue and counted. Samples were then stained for flow cytometric analyses or resuspended in fetal bovine serum containing 10% of dimethyl sulfoxide for storage in liquid nitrogen.

### Ex Vivo Tumor Phenotyping

[0988] For the purpose of immune phenotyping, single-cell suspensions were seeded into a 96-well V-bottomed plate. Cells were labeled for viability using the Zombie Aqua viability dye (BioLegend). To block Fcγ receptors, cells were incubated with 10 g/mL of anti-CD16, anti-CD32 and anti-CD64 antibodies (BD Bioscience) in cold 1×PBS buffer for 10 minutes. Immune populations were stained with anti-human antibodies (see Table 12). After washing (1% BSA, 0.1% sodium azide, in PBS), cells were acquired on FACS Fortessa cytometer (BD Bioscience). Analysis was done using FlowJo.

### Ex Vivo Tumor Culture

[0989] Human TDC samples were seeded at 0.1×10⁶ of CD45+ cells per well in 96-well plate, pre-coated with anti-CD3 and anti-CD28 antibodies (10 μg/ml both). Complete medium, [RPMI 1640 (BI, Cat. #01-110-1A) supplemented with 10% human AB serum (Sigma, Cat. #H3667), 1% Penicillin/Streptomycin (BI, Cat. #03-031-1B), 1% 1-glutamine (Life Technologies, Cat. #35050-038) and 1% of sodium pyruvate (BI, Cat. #03-042-1B)] was used. Samples were treated with 10 μg/ml isotype control, anti-human IL-18BP Ab-71739, anti-PD1 Ab pembrolizumab or with combination of Ab-71739+ pembrolizumab. After 60 h of incubation, supernatants were collected, cytokine secretion was tested using BD cytometric bead array (CBA) human Th1/Th2/Th17 cytokine kit (Cat. #560484) and Granzyme B secretion was tested using Human Granzyme B kit (R&D, Cat. #DY2906-05), according to the manufacturers' protocols.

TABLE 13
FACS staining panel.

| Marker | Fluorophore |
|---|---|
| Live/dead | BV510 |
| CD45 | BUV395 |
| CD3 | APC-Cy7 |
| CD4 | BUV496 |
| CD8 | BV785 |
| CD56 | BV421 |
| CD11b | AF488 |
| CD14 | APC |

### Results

[0990] TDC samples were FACS stained for immunophenotyping of the CD45⁺ leukocyte composition (FIG. 82A), which included T, NK, and myeloid populations.

[0991] Upon stimulation with anti-CD3/anti-CD28 mAbs, Ab-71739 treatment enhanced TNFa, IFNg, IL2 and Granzyme B secretion, as compared with media (FIG. 82B, blue vs. grey bars). Moreover, combination of Ab-71739 with anti-PD1 Ab pembrolizumab further increased TNFa, IFNg, and Granzyme B secretion, compared with Pembro treatment alone (green vs. red bars; fourth and third columns respectively, for each graph).

[0992] These results indicate that IL18 levels produced by TME cell populations are sufficient to enhance immunoreactivity upon treatment with anti-IL18BP Ab, presumably by blocking IL18:IL18BP interaction and increasing free IL18 levels, resulting in activation of T and NK cells.

### REFERENCES

[0993] 1. Aoki H, Shichino S, Matsushima K, Ueha S. Revealing Clonal Responses of Tunor-Reactive T-Cells Through T Cell Receptor Repertoire Analysis. Frontiers in Immunology [Internet]. 2022 [cited 2023 Jul. 10]; 13. Available from: https://www.frontiersin.org/articles/I0.3389/fimmu.2022.807696
[0994] 2. Li H, Leun A M van der, Yofe I, Lubling Y, Gelbard-Solodkin D, Akkooi A C J van, Braber M van den, Rozeman E A, Haanen JBAG, Blank C U, Horlings H M, David E, Baran Y, Bercovich A, Lifshitz A, Schumacher T N, Tanay A, Amit I. Dysfunctional CD8 T Cells Form a Proliferative, Dynamically Regulated Compartment within Human Melanoma. Cell. 2019 Feb. 7; 176(4):775-789.e18.
[0995] 3. Plebanek M I P, Xue Y, Nguyen Y V, DeVito N C, Wang X, Holtzhausen A, Beasley G M, Yarla N, Thievanthiran B, Hanks B A. A SREBF2-dependent gene program drives an immunotolerant dendritic cell population during cancer progression. bioRxiv. 2023 Apr. 28; 2023.04.26.538456.

### Example 23: Harnessing Natural IL-18 Activity Through IL-18BP Blockade Reshapes the Tumor Microenvironment for Potent Anti-Tumor Immune Response

### Background

[0996] IL-18 is an inflammasome-induced proinflammatory cytokine that activates T and NK cells and stimulates IFNγproduction (C. A. Dinarello, D. Novick, S. Kim, G. Kaplanski, Interleukin-18 and IL-18 binding protein. Front Immunol 4, 289 (2013); S. L. Swain, Interleukin 18: Tipping the Balance towards a T Helper Cell I Response. Journal of Experimental Medicine 194, F11-4F14 (2001)). The activity of IL-18 is naturally blocked by a high affinity endogenous binding-protein (IL-18BP) (C. A. Dinarello, D. Novick, S. Kim, G. Kaplanski, Interleukin-18 and IL-18 binding protein. Front Immunol 4, 289 (2013)) that is induced in response to IFNγupregulation as a negative feedback mechanism (J. Paulukat, M. Bosmann, M. Nold, S. Garkisch, H. Kampfer, S. Frank, J. Raedle, S. Zeuzem, I. Pfeilschifter, H Mühl, Expression and release of IL-18 binding protein in response to IFN-gamma. J Immunol 167, 7038-7043 (2001)).

### Methods

[0997] To address whether bound-IL-18 levels in the tumor are above the level required for in-vitro human T-cell activation, total and free IL-18 across tumor types was assessed. By assessing total and free IL-18 whether bound-IL-18 levels in the tumor are above the level required for in-vitro human T-cell activation was examined. To unleash endogenous bound IL-18 activity, anti-IL18BP Ab, an anti-IL-18BP blocker Ab, was generated and examined in T cell-based assays. In-vivo, IL-18BP blockade was evaluated in multiple mouse tumor models. Tumor microenvironment (TME) modulation was assessed by flow cytometry, scRNA sequencing and cytokine profiling.

### Results

[0998] IL-18 was highly expressed across 75 individual tumors and was clearly elevated compared to serum (FIGS. 83A-83B). Results show that most of tumor IL-18 was bound by IL-18BP, and its levels were above the amount required for T-cell activation in-vitro, implying that releasing tumor IL-18 locally could lead to T cell activation (FIGS. 83C-83D), anti-IL18BP Ab can displace IL-18 from IL-18:IL-18BP complex and accordingly was shown to enhance T-cell activation in an ex-vivo stimulated human CD8+ tumor infiltrating lymphocytes-tumor cells co-culture assay and in human dissociated tumor cells assay (FIG. 84). In addition, tumor growth inhibition was observed by anti-mouse IL-18BP Ab in multiple tumor models either alone or in combination with anti-PD-L1 (FIG. 85). Furthermore, in E0771 model, IL-18BP blockade induced significant increase in functional immune-cells and striking changes in clusters of lymphocytes, including decrease in naïve and increase in effector T-cells and an increase in T cell clonal expansion (FIG. 86). IL-18BP blockade also increased pro-inflammatory cytokine secretion and skewed cell populations of myeloid lineage to favor proinflammatory macrophages (FIG. 87). In MC380VA^{dim} model, in which both TME and periphery were evaluated, anti-mouse IL-18BP Ab also induced potent TME immune-modulation, including increased CD8+ T-cell infiltration and IFNγ secretion, while no increase in IFNγ secretion, lymphocytes number, or activation state was evident in serum and spleen (FIG. 88).

### Conclusions

[0999] IL-18 is upregulated in human tumors and is mostly bound by IL18BP, anti-IL18BP Ab, a high-affinity anti-IL-18BP Ab, induces human T-cell responses in vitro and ex vivo. An anti-mouse IL-18BP Ab induces potent anti-tumor responses and pronounced TME-constrained immune modulation, this in contrast to systemically administered therapeutic cytokines, which can generate systemic inflammatory responses (FIG. 89) (Harnessing cytokines and chemokines for cancer therapy Nature Reviews Clinical Oncology (available on the World Wide Web at nature.com/articles/s41571-021-00588-9)). Taken together, blocking IL-18BP is a promising novel approach to harness cytokine potency for the treatment of cancer.

### Example 24: Harnessing Natural IL-18 Activity Through IL-18BP Blockade Reshapes the Tumor Microenvironment for Potent Anti-Tumor Immune Response

### Background

[1000] To determine the contribution of particular immune cell populations to the effects of anti-mouse IL-18BP Ab, we performed antibody (Ab)-mediated depletion studies in MC380VA^{dim} tumor model. In addition, anti-tumor activity of anti-IL-18BP Ab was examined in 4T1 and LLC tumor models, which are considered as poorly infiltrated by the immune system, thus have relatively low numbers of tumor infiltrating T and NK cells. Finally, the tumor immune composition of several mouse models was examined, and compared to the degree of anti-tumor activity induced by IL-18BP blockade.

### Method

### Cell Culture

[1001] B16/Db-hmgp100 cells were kindly provided by Dr. Hanada et al. (HHS agency) and were licensed from NIH. B16/Db-hmgp100 cells were generated by double transduction of B16F10 with H-2Db and a retrovirus that encodes chimeric mouse gp100 that is comprised of the human gp10025-33 and the rest of mouse gp100. Murine colon carcinoma MC38OVA^{dim} cells (clone UC10 4H10) were received from the Peter MacCallum cancer center. E0771 cell line was purchased from CH3 BioSystems (Product: #94A001). CT26 (CRL-2638), LLC (CRL-1642) and 4T1 (CRL-2539) cell lines were purchased from ATCC.

### Inoculation of Mice

[1002] MC380VA^{dim} (106 or 1.2×10⁶), CT26 (2.5×10⁵), LLC (2×10⁵) or B16/Db-hmgp100 (1×10⁵) cells were injected subcutaneously into the right flank of the mouse (50 μl). 4T1 cells (2×10⁵) and E0771 cells (5×10⁵) were inoculated orthotopically into the left mammary fat pad in a 1:1 mixture with Matrigel (Corning) in a volume of 100 μl. Tumor growth was measured with an electronic caliper every 2-3 days and was reported as 0.5×W2×L mm³.

### Administration of Anti-mIL-18BP to Tumor-Bearing Mice

[1003] At a tumor volume of 130-260 mm³ for MC38OVA^{dim}, 260 mm³ for E0771, or on day 4 post tumor inoculation (palpable tumors) of B16/Db-hmgp100, LLC and 4T1, mice were randomly assigned into treatment groups. Anti-IL-18BP Ab, or isotype control (15 mg/kg) were injected intraperitoneally twice a week for a total of 6 treatments.

### Depletion Studies in MC380VA^{dim} Tumor Model

[1004] Mice were assigned into 4 groups and were injected with anti-CD4 (GK1.5), anti-CD8 (Lyt 3.2), anti-NK1.1 (PK136) or isotype control prior to tumor inoculation (day −1), and on days 6, 13 and 20 for a total of 4 treatments. At tumor volume of 120 mm³, mice were randomly assigned into treatment groups and treated i.p. with anti-IL-18BP or with isotype control twice a week for a total of 6 treatments (see, Table 14 for additional details).

TABLE 14
Depletion antibodies and monotherapy with anti-mouse
IL-18BP mIgG1-D265A or Synagis mIgG1-D265A mAbs:
Mice were injected with depletion antibodies and 15 mg/kg
Synagis mIgG1-D265A or anti-IL-18BP mIgG1-D265A
antibodies were injected to groups of 10 mice (i.p,).

| | Antibody 1 | Dose | Antibody 2 | Dose | |
|---|---|---|---|---|---|
| Group | (depletion) | (μg) | (treatment) | (mg/kg) | n |
| 1 | PBS | | Synangis | | 9 |
| 2 | Isotype ab | 100 | D265A | 10 | 9 |
| | Rat IgG1 | | | | |
| 3 | Anti-CD4 (GK1.5) | 300 | | 10 | 10 |
| | B.B-Rat IgG2b | | | | |
| 4 | Anti-CD8 (Lyt 3.2) | 100 | | 10 | 8 |
| | B.B-Rat IgG1 | | | | |
| 5 | Anti-NK1.1 (PK136) | 50 | | 10 | 10 |
| | B.B-mIgG2a | | | | |
| 6 | PBS | | aIL-18BP | | 9 |
| 7 | Isotype ab | 100 | | 10 | 9 |
| | Rat IgG1 | | | | |
| 8 | Anti-CD4 (GK1.5) | 300 | | 10 | 10 |
| 9 | Anti-CD8 (Lyt 3.2) | 100 | | 10 | 8 |
| 10 | Anti-NK1.1 (PK136) | 50 | | 10 | 10 |

### Tumor Immune Phenotyping

[1005] Mouse tumor samples were dissociated by gentleMACS (Miltenyi Biotec) using mouse dissociation kits (Miltenyi Biotec). Dissociated tumor cells were filtered through a 70 m filter, stained with Aqua Live Dead (Life Technologies) to distinguish live cells from dead cells followed by staining with a cocktail of anti-CD16, anti-CD32, anti-CD64 antibodies to block nonspecific binding to Fcγ receptors. Various immune populations were stained with anti-mouse antibodies (see, Table 15). All staining was carried out for 30 minutes at 4° C. Samples were acquired on a Fortessa X-20 flow cytometer (BD Biosciences). Analysis was completed using FlowJo (TreeStar LLC) and gated on specific populations.

TABLE 15
FACS staining panels to identify different immune
cell types for immune phenotyping.

| | Marker | Fluorophore | Vendor |
|---|---|---|---|
| Lymphoid | Live/dead | BV510 | |
| | CD45 | BV605 | Biolegend |
| | CD3 | BV421 | Biolegend |
| | CD4 | BV785 | Biolegend |
| | CD8 | PE-Cy7 | Biolegend |
| | CD19 | PercpCy5.5 | Biolegend |
| | NK1.1 | FITC | Biolegend |
| | CD44 | PE | Biolegend |
| | CD62L | APC | Biolegend |

### Results

### Depletion Studies in MC380VA^{dim} Tumor Model

[1006] While the anti-tumor activity of IL-18BP blockade was abrogated by the depletion of CD8+ T cells, with a minor effect on tumor volume (15.8% TGI, p=ns) and no effect on survival (FIG. 90A), the depletion of CD4+ T cells only partially abrogated anti-tumor effects of anti-IL-18BP Ab (35.6% TGI, p=0.0005) with a trend for improved survival, p=0.3, FIG. 90B). Moreover, the anti-tumor effects of anti-IL-18BP Ab were completely abolished on the background of NK cell depletion (FIG. 90C). We concluded that in MC380VA^{dim} tumor model the activity of IL-18BP blockade depends mainly on CD8+ T cells and on NK cells.

### Activity of Anti-IL-18BP Ab in Poorly Immune Infiltrated Syngeneic 4T1 and LLC Mouse Tumor Model

[1007] In both 4T1 and LLC tumor models, IL-18BP blockade neither affected tumor growth (FIGS. 91A-91B) nor mouse survival (data us not shown). Both models have relatively low numbers of tumor infiltrating T and NK cells (FIG. 91C) supporting the requirement of tumor infiltrating T or NK cells for effective treatment with anti-IL-18BP Ab.

[1008] Correlation between tumor microenvironment (TME) immune cell composition and degree of anti-tumor activity of anti-IL-18BP Ab

[1009] We compared tumor immune composition of several mouse models (E0771, MC380VA^{dim}, B16/Db-hmgp100, CT26, 4T1, and LLC), and correlated it to the degree of anti-tumor activity induced by IL-18BP blockade. This analysis revealed that the response to anti-IL-18BP treatment is positively correlated with the infiltration of CD8+ T cells (FIG. 91D). The anti-tumor activity observed in B16/Db-hmgp100 tumor model could be attributed to the relatively high percentage of NK cells (FIG. 91C).

### Conclusions

[1010] Collectively, the anti-tumor activity of IL-18BP blockade in vivo depends on tumor infiltrating CD8+ T and on NK cells and partially on CD4+ T cells, which are the main immune populations expressing the IL-18Ra (data not shown).

### Example 25: Expression of IL-18 and Bound-IL-18 Levels in the Tumor is Higher than in Normal Tissues Adjacent to the Tumors

### Background

[1011] To address whether total IL-18 and IL-18BP-bound IL-18 (i.e., inactive) in the tumor are higher than in normal tissues adjacent to the tumor (NAT), IL-18 and bound IL-18 were measured in tumor biopsies and matched NAT samples (Table 16). Bound IL-18 levels were calculated by deducting IL-18 free from total IL-18 measured for each sample by two separate ELISA kits.

### Methods

### Tissue Processing

[1012] Tumor and matched NAT samples (Table 16) were cut into small pieces with a scalpel and transferred to GentleMACs™ C tubes (Miltenyi Biotec) containing an enzyme mix using human tumor Dissociation Kit (Miltenyi Biotec), as per the manufacturer's protocol. After dissociation, samples were centrifuged at 300 g for 5 minutes and supernatants were collected and recentrifuged at 3130 g for 10 minutes. Following centrifugation, supernatants were recollected and distributed in aliquots for storage at −80° C. At the day of the assay, samples were thawed at room temperature and subsequently centrifuged at 14,000 RPM for 10 min and supernatants were collected for immediate usage in ELISAs with the following kits:
[1013] Human IL-18 ELISA kit (MBL,7620)
[1014] Human IL-18 free detection kit (in house protocol)

### Human Free IL-18 ELISA Protocol

[1015] Anti-human IL-18 hIgG1 clone 12GL (patent US 2014/0004128A1) was diluted to 1 μg/ml in PBS and coated on ELISA plate overnight at 4° C. (100 μl/well). Coated plates were washed three times with PBST and incubated with 300p1 blocking buffer (1% BSA in PBS) at room temperature (RT) for 2 hrs. Blocking buffer was removed and plates were washed three times with PBST. Human healthy donor serums were diluted 1:2 with 1% BSA in PBS. Standard curve was generated by incubating 2-fold serial dilutions of human IL-18 (starting at 1 ng/ml) in 1% BSA in PBS. Plates were washed three times with PBST buffer (1×PBS pH 7.4, 0.05% Tween20) and 100 μl/well biotinylated anti-IL-18 detection antibody, cat. D0456 R&D; 1:1000 diluted in 1% BSA in PBS was added. This was incubated for 1 hr and plates were washed again as described above after antibody binding. 100 μl/well horse radish peroxidase HRP-conjugated streptavidin, Jackson, 1:1000 was added, and plates were incubated for 1 hr at RT. plates were washed again as described above after antibody binding. ELISA signals were developed in all wells by adding 50 μL of TNIB substrate (Scytek) and incubating for 5-20 mins. The HIRP reaction was stopped by adding 50 μL 1N HCL and absorbance signals at 450 nm were read (EnSpire, Perkin Elmar). The assay was done in duplicate. Data was analyzed using GraphPad Prism software.

TABLE 16
A list of human tumor tissues and matched NAT
(normal adjacent tissue) obtained for ELISA
measurements of total IL-18 and bound IL-18.

| | | IL-18 | IL-18 |
|---|---|---|---|
| I.D. Number | Tumor's site | total | bound |
| T33 and N33 | Colon | X | X |
| T34 and N34 | Colon | X | X |
| T43 and N43 | Colon | X | X |
| T64 and N64 | Colon | X | X |
| T69 and N69 | Colon | X | X |
| T6 and N6 | Colon | X | |
| T7 and N7 | Colon | X | |
| T41 and N41 | Endometrium | X | |
| T60 and N60 | Endometrium | X | X |
| T31 and N31 | Ovary | X | |
| T63 and N63 | Kidney | X | |
| T24 and N24 | Stomach | X | X |
| T17 and N17 | Stomach | X | |
| T87 and N87 | Breast | X | |
| T76 and N76 | Bladder | X | |
| T22 and N22 | Lung | X | |
| T72 and N72 | Lung | X | |

### Results and Conclusions

[1016] IL-18 and bound IL-18 levels were measured in matched NAT and tumor derived supernatant samples. As shown in FIG. 92, IL-18 (FIG. 92A) and bound IL-18 (FIG. 92B) levels in the tumor are significantly higher compared to matched NAT samples. IL-18 and bound IL-18 upregulation in the tumor may potentially induce an enhanced response to IL-18 in the TME compared to periphery.

### Example 26: IL-18BP Epitope Mapping

### Materials and Methods

### Materials

[1017] The materials used in the experiments were as follows:
[1018] Human IL-18BP Protein, His Tag (MALS verified) Cat #ILP-H5222, Acro biosystems, and
[1019] ADI-71739.

### Methods

### Hydrogen-Deuterium Exchange—Mass Spectrometry (HDX-MS).

[1020] Hydrogen-deuterium exchange mass spectrometry (HDX-MS) is a method used to study changes in protein structure under different conditions. HDX-MS works by exposing a protein to a solution of deuterium (a heavier, stable isotope of hydrogen that can be differentiated from hydrogen by MS). Deuterium atoms exchange with specific hydrogens in the protein backbone at different rates depending on their exposure to the surrounding solution. These exchanges are then measured using mass spectrometry. Hydrophobic regions and other regions that are not exposed to the solution exchange deuterium slowly, while flexible or solvent-exposed regions exchange more rapidly. This allows for the understanding of changes in amino acid exposure. In this instance, ADI-71739 “protected” its epitope on human IL-18BP from deuterium exchange and comparing this to exchange-rates on non-protected IL-18BP revealed the map of the epitope region.

### Assay Details

[1021] The HDX-MS assay was carried out using the Leap HDX auto sampler and Waters cyclic IMS MS. Nine different proteases were initially tested, with Nep2 (N=1) or Pepsin (N=2) proteases showing the best coverage results when used at a 7.5° C. digestion temperature.

### Results

### Mass-Spec Coverage

[1022] Nep2 and pepsin were chosen based on the amino-acid coverage of human IL-18BP detected by MS. The N-terminal region of human IL-18BP is disordered and thus was not properly covered by MS. Further gaps in coverage could be explained by glycosylation sites or other possible post-translational modifications (FIGS. 93A and 93B). As shown in FIG. 93A, when digested by Nep2 protease, 33 peptides were detected, covering 55.3% of hIL-18BP. In addition, as shown in FIG. 93B, when digested by pepsin protease. 20 peptides were detected, covering 49.4% of hIL-18BP.

### Changes in Deuterium Exchange

[1023] Changes in the uptake of deuterium, detected by MS, were mapped onto the amino acid sequence of hIL-18BP. Amino acid stretches with changes to deuterium exchange between the unbound and antibody-bound hIL-18BP were outlined into defined regions. Areas with reduced hydrogen-deuterium exchange are shaded darker, indicating that these were less-exposed to the solution following antibody binding (FIGS. 94A and 94B). Specifically, in FIG. 94A, the gaps of coverage were caused by glycosylation, and N terminus was very difficult to cover. In FIG. 94B, similarly, the gaps of coverage were caused by glycosylation, and N terminus was very difficult to cover. In addition, there was additional coverage adjacent to region 2, there was coverage to C-terminus, there was new cutoff site on region 6 thanks to the peptide orientation, and regions 3 and 4 were hard to distinguish in this set due to long peptides.

[1024] Region 6 had the largest difference in both data sets. When mapping the changes in deuterium uptake to the 3D structure of hIL-18BP, it was revealed that regions 1 and 6 formed a tertiary-structure epitope based on amino acids SIL in region 1 (SRFPNFSIL; SEQ ID NO: 1917) and DPEQVVQR (SEQ ID NO: 1918) in region 6 (VDPEQVVQRH; SEQ ID NO: 1919). FIG. 95 shows mapping of HDX on alpha-fold prediction structure of hIL-18BP. Dark regions indicate ADI-71739 epitope, which appeared on regions 1 and 6.

[1025] Mapping the ADI-71739 epitope region onto a solved crystal structure of IL-18BP bound to IL-18 (7AL7), along with the binding site (Detry et al., Journal of Biological Chemistry, 298(5):101908 (2022)), revealed that the two regions are close to each other, but only overlap in one amino acid of region 1 and 2 amino acids of region 6 (FIG. 96A).

[1026] The epitope mapping revealed the distance between regions 1 and 6 is 4.4A (0.44 nm), while the distance between regions 1 and 4 is 16A, which is 1.6 nm (FIG. 96B). Regions 1 and 6 are most likely to constitute the antibody binding site.

[1027] There exists four isoforms of IL-18BP, denoted a, b, c, and d (FIG. 97). The amino acid sequence alignment between isoforms a and c, a and d, and a and b are shown in FIGS. 98A-98C, respectively. Only isoforms a and c are active and bind IL-18 and both contain the suggested epitope, indicating that ADI-71739 is capable of binding both the a and c active isoforms (FIGS. 97 and 98A-98C).

### Discussion and Conclusions

[1028] HDX-MS analysis of ADI-71739 antibody binding to IL-18BP demonstrates a conformational epitope, comprised of a short amino acid stretch SIL from region 1 (SEQ ID NO: 1917), and a loop DPEQVVQR (SEQ ID NO: 1918) from region 6 (SEQ ID NO: 1919). Notably, both active isoforms of IL-18BP (a and c) contain this epitope, indicating that ADI-71739 can bind both.

[1029] This epitope has a small overlap with the binding site of IL-18BP and IL-18 (one amino acid from region 1 and two amino acids from region 6). This overlap is consistent with the displacement of IL-18 from IL-18BP under ADI-71739 binding.

[1030] Other regions on IL-18BP were found to have somewhat reduced deuterium uptake upon ADI-71739 binding. These results are likely due to conformational changes to IL-18BP upon antibody binding, and these regions are too far from regions 1 and 6 to form a single continuous epitope. Notably, regions 2, 3 and 4 are continuous, which is consistent with how all 3 sites undergo conformational changes together.

[1031] The examples set forth above are provided to give those of ordinary skill in the art a complete disclosure and description of how to make and use the embodiments of the compositions, systems and methods of the invention, and are not intended to limit the scope of what the inventors regard as their invention. Modifications of the above-described modes for carrying out the invention that are obvious to persons of skill in the art are intended to be within the scope of the following claims. All patents and publications mentioned in the specification are indicative of the levels of skill of those skilled in the art to which the invention pertains.

[1032] All headings and section designations are used for clarity and reference purposes only and are not to be considered limiting in any way. For example, those of skill in the art will appreciate the usefulness of combining various aspects from different headings and sections as appropriate according to the spirit and scope of the invention described herein.

[1033] All references cited herein are hereby incorporated by reference herein in their entireties and for all purposes to the same extent as if each individual publication or patent or patent application was specifically and individually indicated to be incorporated by reference in its entirety for all purposes.

[1034] Many modifications and variations of this application can be made without departing from its spirit and scope, as will be apparent to those skilled in the art. The specific embodiments and examples described herein are offered by way of example only, and the application is to be limited only by the terms of the appended claims, along with the full scope of equivalents to which the claims are entitled.

The application's sequence listing, which the Patent Office published only in electronic form, follows.

SEQUENCE LISTING (2461 sequences)

SEQ ID NO: 1 - protein, 9 aa, synthetic construct
  REGION 1..9: note = synthetic
  VARIANT 4: note = X is N, R, D, G
  VARIANT 5: note = X is S, H, I or Q
  VARIANT 8: note = X is M or V
YTFXXYAXH

SEQ ID NO: 2 - protein, 17 aa, synthetic construct
  REGION 1..17: note = synthetic
  VARIANT 8: note = X is N, A or V
  VARIANT 10: note = X is K or L
WIHAGTGXTXYSQKFQG

SEQ ID NO: 3 - protein, 17 aa, synthetic construct
  REGION 1..17: note = synthetic
  VARIANT 6: note = X is S or E
ARGLGXVGPTGTSWFDP

SEQ ID NO: 4 - protein, 11 aa, synthetic construct
  REGION 1..11: note = synthetic
RASQGISSWLA

SEQ ID NO: 5 - protein, 7 aa, synthetic construct
  REGION 1..7: note = synthetic
EASSLES

SEQ ID NO: 6 - protein, 9 aa, synthetic construct
  REGION 1..9: note = synthetic
  VARIANT 5: note = X is S, V, Y, L or Q
  VARIANT 6: note = X is F, S or G
QQYRXXPFT

SEQ ID NO: 7 - protein, 9 aa, synthetic construct
  REGION 1..9: note = synthetic
  VARIANT 4: note = X is S or N
  VARIANT 5: note = X is E or S
  VARIANT 7: note = X is V or P
GTFXXYXIS

SEQ ID NO: 8 - protein, 17 aa, synthetic construct
  REGION 1..17: note = synthetic
  VARIANT 5: note = X is G or Y
  VARIANT 6: note = X is A or S
  VARIANT 10: note = X is N, I, or V
GIIPXXGTAXYAQKFQG

SEQ ID NO: 9 - protein, 9 aa, synthetic construct
  REGION 1..9: note = synthetic
  VARIANT 6: note = X is S, G or F
ARGRHXHET

SEQ ID NO: 10 - protein, 11 aa, synthetic construct
  REGION 1..11: note = synthetic
RASQGISSWLA

SEQ ID NO: 11 - protein, 7 aa, synthetic construct
  REGION 1..7: note = synthetic
AASSLQS

SEQ ID NO: 12 - protein, 9 aa, synthetic construct
  REGION 1..9: note = synthetic
  VARIANT 5: note = X is S or R
  VARIANT 6: note = X is L, I or F
QQVYXXPWT

SEQ ID NO: 13 - protein, 9 aa, synthetic construct
  REGION 1..9: note = synthetic
  VARIANT 4: note = X is G or D or S
  VARIANT 6: note = X is T or V or Y
FTFXNXAMS

SEQ ID NO: 14 - protein, 17 aa, synthetic construct
  REGION 1..17: note = synthetic
  VARIANT 4: note = X is G or A
  VARIANT 5: note = X is N or S
  VARIANT 6: note = X is A or G
AISXXXGSTYYADSVKG

SEQ ID NO: 15 - protein, 11 aa, synthetic construct
  REGION 1..11: note = synthetic
AKGPDRQVFDY

SEQ ID NO: 16 - protein, 11 aa, synthetic construct
  REGION 1..11: note = synthetic
  VARIANT 7: note = X is S or D
RASQGIXSWLA

SEQ ID NO: 17 - protein, 7 aa, synthetic construct
  REGION 1..7: note = synthetic
AASSLQS

SEQ ID NO: 18 - protein, 9 aa, synthetic construct
  REGION 1..9: note = synthetic
  VARIANT 4: note = X is Y or L
  VARIANT 5: note = X is S or F
QHAXXFPYT

SEQ ID NO: 19 - protein, 11 aa, synthetic construct
  REGION 1..11: note = synthetic
  VARIANT 6: note = X is S or P
  VARIANT 7: note = X is E or D
  VARIANT 9: note = X is G, Y, or P
GSISSXXYXWG

SEQ ID NO: 20 - protein, 16 aa, synthetic construct
  REGION 1..16: note = synthetic
  VARIANT 3: note = X is Y or V
  VARIANT 4: note = X is Y or N
  VARIANT 5: note = X is Q or S
  VARIANT 7: note = X is S or A
SIXXXGXTYYNPSLKS

SEQ ID NO: 21 - protein, 11 aa, synthetic construct
  REGION 1..11: note = synthetic
  VARIANT 5: note = X is Y or H
  VARIANT 8: note = X is V or L
ARGPXRQXFDY

SEQ ID NO: 22 - protein, 11 aa, synthetic construct
  REGION 1..11: note = synthetic
RASQGISSWLA

SEQ ID NO: 23 - protein, 7 aa, synthetic construct
  REGION 1..7: note = synthetic
AASSLQS

SEQ ID NO: 24 - protein, 9 aa, synthetic construct
  REGION 1..9: note = synthetic
  VARIANT 4: note = X is S or F
  VARIANT 5: note = X is S or V
QQGXXFPYT

SEQ ID NO: 25 - protein, 9 aa, synthetic construct
  REGION 1..9: note = synthetic
  VARIANT 4: note = X is any amino acid
  VARIANT 5: note = X is any amino acid
  VARIANT 8: note = X is any amino acid
YTFXXYAXH

SEQ ID NO: 26 - protein, 17 aa, synthetic construct
  REGION 1..17: note = synthetic
  VARIANT 8: note = X is any amino acid
  VARIANT 10: note = X is any amino acid
WIHAGTGXTXYSQKFQG

SEQ ID NO: 27 - protein, 17 aa, synthetic construct
  REGION 1..17: note = synthetic
  VARIANT 6: note = X is any amino acid
ARGLGXVGPTGTSWFDP

SEQ ID NO: 28 - protein, 11 aa, synthetic construct
  REGION 1..11: note = synthetic
RASQGISSWLA

SEQ ID NO: 29 - protein, 7 aa, synthetic construct
  REGION 1..7: note = sfynthetic
EASSLES

SEQ ID NO: 30 - protein, 9 aa, synthetic construct
  REGION 1..9: note = synthetic
  VARIANT 5: note = X is any amino acid
  VARIANT 6: note = X is any amino acid
QQYRXXPFT

SEQ ID NO: 31 - protein, 9 aa, synthetic construct
  REGION 1..9: note = synthetic
  VARIANT 4: note = X is any amino acid
  VARIANT 5: note = X is any amino acid
  VARIANT 7: note = X is any amino acid
GTFXXYXIS

SEQ ID NO: 32 - protein, 17 aa, synthetic construct
  REGION 1..17: note = synthetic
  VARIANT 6: note = X is any amino acid
  VARIANT 10: note = X is any amino acid
GIIPGXGTAXYAQKFQG

SEQ ID NO: 33 - protein, 9 aa, synthetic construct
  REGION 1..9: note = synthetic
  VARIANT 6: note = X is any amino acid
ARGRHXHET

SEQ ID NO: 34 - protein, 11 aa, synthetic construct
  REGION 1..11: note = synthetic
RASQGISSWLA

SEQ ID NO: 35 - protein, 7 aa, synthetic construct
  REGION 1..7: note = synthetic
AASSLQS

SEQ ID NO: 36 - protein, 9 aa, synthetic construct
  REGION 1..9: note = synthetic
  VARIANT 5: note = X is any amino acid
  VARIANT 6: note = X is any amino acid
QQVYXXPWT

SEQ ID NO: 37 - protein, 9 aa, synthetic construct
  REGION 1..9: note = synthetic
  VARIANT 4: note = X is any amino acid
  VARIANT 5: note = X is any amino acid
  SITE 6: note = misc_feature - Xaa can be any naturally occurring amino acid
FTFXNXAMS

SEQ ID NO: 38 - protein, 17 aa, synthetic construct
  REGION 1..17: note = synthetic
  VARIANT 4: note = X is any amino acid
  VARIANT 5: note = X is any amino acid
  VARIANT 6: note = X is any amino acid
AISXXXGSTYYADSVKG

SEQ ID NO: 39 - protein, 11 aa, synthetic construct
  REGION 1..11: note = synthetic
AKGPDRQVFDY

SEQ ID NO: 40 - protein, 11 aa, synthetic construct
  REGION 1..11: note = synthetic
  VARIANT 7: note = X is any amino acid
RASQGIXSWLA

SEQ ID NO: 41 - protein, 7 aa, synthetic construct
  REGION 1..7: note = synthetic
AASSLQS

SEQ ID NO: 42 - protein, 9 aa, synthetic construct
  REGION 1..9: note = synthetic
  VARIANT 4: note = X is any amino acid
  VARIANT 5: note = X is any amino acid
QHAXXFPYT

SEQ ID NO: 43 - protein, 11 aa, synthetic construct
  REGION 1..11: note = synthetic
  VARIANT 6: note = X is any amino acid
  VARIANT 7: note = X is any amino acid
  VARIANT 9: note = X is any amino acid
GSISSXXYXWG

SEQ ID NO: 44 - protein, 16 aa, synthetic construct
  REGION 1..16: note = synthetic
  VARIANT 3..5: note = X is any amino acid
  VARIANT 7: note = X is any amino acid
SIXXXGXTYYNPSLKS

SEQ ID NO: 45 - protein, 11 aa, synthetic construct
  REGION 1..11: note = synthetic
  VARIANT 5: note = X is any amino acid
  VARIANT 8: note = X is any amino acid
ARGPXRQXFDY

SEQ ID NO: 46 - protein, 11 aa, synthetic construct
  REGION 1..11: note = synthetic
RASQGISSWLA

SEQ ID NO: 47 - protein, 7 aa, synthetic construct
  REGION 1..7: note = synthetic
AASSLQS

SEQ ID NO: 48 - protein, 9 aa, synthetic construct
  REGION 1..9: note = synthetic
  VARIANT 4..5: note = X is any amino acid
QQGXXFPYT

SEQ ID NO: 49 - protein, 330 aa, synthetic construct [sequence omitted]

SEQ ID NO: 50 - protein, 326 aa, synthetic construct
  REGION 1..326: note = synthetic
ASTKGPSVFPLAPCSRSTSESTAALGCLVKDYFPEPVTVSWNSGALTSGVHTFPAVLQSSGLYSLSSVVTVPSSNFGTQTYTCNVDHKPSNTKVDKTVERKCCVECPPCPAPPVAGPSVFLFPPKPKDTLMISRTPEVTCVVVDVSHEDPEVQFNWYVDGVEVHNAKTKPREEQFNSTFRVVSVLTVVHQDWLNGKEYKCKVSNKGLPAPIEKTISKTKGQPREPQVYTLPPSREEMTKNQVSLTCLVKGFYPSDIAVEWESNGQPENNYKTTPPMLDSDGSFFLYSKLTVDKSRWQQGNVFSCSVMHEALHNHYTQKSLSLSPGK

SEQ ID NO: 51 - protein, 377 aa, synthetic construct
  REGION 1..377: note = synthetic
ASTKGPSVFPLAPCSRSTSGGTAALGCLVKDYFPEPVTVSWNSGALTSGVHTFPAVLQSSGLYSLSSVVTVPSSSLGTQTYTCNVNHKPSNTKVDKRVELKTPLGDTTHTCPRCPEPKSCDTPPPCPRCPEPKSCDTPPPCPRCPEPKSCDTPPPCPRCPAPELLGGPSVFLFPPKPKDTLMISRTPEVTCVVVDVSHEDPEVQFKWYVDGVEVHNAKTKPREEQYNSTFRVVSVLTVLHQDWLNGKEYKCKVSNKALPAPIEKTISKTKGQPREPQVYTLPPSREEMTKNQVSLTCLVKGFYPSDIAVEWESSGQPENNYNTTPPMLDSDGSFFLYSKLTVDKSRWQQGNIFSCSVMHEALHNRFTQKSLSLSPGK

SEQ ID NO: 52 - protein, 327 aa, synthetic construct
  REGION 1..327: note = synthetic
ASTKGPSVFPLAPCSRSTSESTAALGCLVKDYFPEPVTVSWNSGALTSGVHTFPAVLQSSGLYSLSSVVTVPSSSLGTKTYTCNVDHKPSNTKVDKRVESKYGPPCPSCPAPEFLGGPSVFLFPPKPKDTLMISRTPEVTCVVVDVSQEDPEVQFNWYVDGVEVHNAKTKPREEQFNSTYRVVSVLTVLHQDWLNGKEYKCKVSNKGLPSSIEKTISKAKGQPREPQVYTLPPSQEEMTKNQVSLTCLVKGFYPSDIAVEWESNGQPENNYKTTPPVLDSDGSFFLYSRLTVDKSRWQEGNVFSCSVMHEALHNHYTQKSLSLSLGK

SEQ ID NO: 53 - protein, 327 aa, synthetic construct
  REGION 1..327: note = synthetic
ASTKGPSVFPLAPCSRSTSESTAALGCLVKDYFPEPVTVSWNSGALTSGVHTFPAVLQSSGLYSLSSVVTVPSSSLGTKTYTCNVDHKPSNTKVDKRVESKYGPPCPPCPAPEFLGGPSVFLFPPKPKDTLMISRTPEVTCVVVDVSQEDPEVQFNWYVDGVEVHNAKTKPREEQFNSTYRVVSVLTVLHQDWLNGKEYKCKVSNKGLPSSIEKTISKAKGQPREPQVYTLPPSQEEMTKNQVSLTCLVKGFYPSDIAVEWESNGQPENNYKTTPPVLDSDGSFFLYSRLTVDKSRWQEGNVFSCSVMHEALHNHYTQKSLSLSPGK

SEQ ID NO: 54 - protein, 124 aa, synthetic construct
  REGION 1..124: note = synthetic
QVQLVQSGAEVKKPGASVKVSCEASGYTFDIYAVHWVRQAPGQRLEWMGWIHAGTGATKYSQKFQGRVTITRDTSASTAYMELSSLRSEDTAVYYCARGLGEVGPTGTSWFDPWGQGTLVTVSS

SEQ ID NO: 55 - protein, 9 aa, synthetic construct
  REGION 1..9: note = synthetic
YTFDIYAVH

SEQ ID NO: 56 - protein, 17 aa, synthetic construct
  REGION 1..17: note = synthetic
WIHAGTGATKYSQKFQG

SEQ ID NO: 57 - protein, 17 aa, synthetic construct
  REGION 1..17: note = synthetic
ARGLGEVGPTGTSWFDP

SEQ ID NO: 58 - protein, 450 aa, synthetic construct
  REGION 1..450: note = synthetic
QVQLVQSGAEVKKPGASVKVSCEASGYTFDIYAVHWVRQAPGQRLEWMGWIHAGTGATKYSQKFQGRVTITRDTSASTAYMELSSLRSEDTAVYYCARGLGEVGPTGTSWFDPWGQGTLVTVSSASTKGPSVFPLAPCSRSTSESTAALGCLVKDYFPEPVTVSWNSGALTSGVHTFPAVLQSSGLYSLSSVVTVPSSSLGTKTYTCNVDHKPSNTKVDKRVESKYGPPCPPCPAPEFLGGPSVFLFPPKPKDTLMISRTPEVTCVVVDVSQEDPEVQFNWYVDGVEVHNAKTKPREEQFNSTYRVVSVLTVLHQDWLNGKEYKCKVSNKGLPSSIEKTISKAKGQPREPQVYTLPPSQEEMTKNQVSLTCLVKGFYPSDIAVEWESNGQPENNYKTTPPVLDSDGSFFLYSRLTVDKSRWQEGNVFSCSVMHEALHNHYTQKSLSLSLG

SEQ ID NO: 59 - protein, 107 aa, synthetic construct
  REGION 1..107: note = synthetic
DIQMTQSPSTLSASVGDRVTITCRASQSISSWLAWYQQKPGKAPKLLIYEASSLESGVPLRFSGSGSGTEFTLTISSLQPDDFATYYCQQYRQSPFTFGGGTKVEIK

SEQ ID NO: 60 - protein, 11 aa, synthetic construct
  REGION 1..11: note = synthetic
RASQSISSWLA

SEQ ID NO: 61 - protein, 7 aa, synthetic construct
  REGION 1..7: note = synthetic
EASSLES

SEQ ID NO: 62 - protein, 9 aa, synthetic construct
  REGION 1..9: note = synthetic
QQYRQSPFT

SEQ ID NO: 63 - protein, 214 aa, synthetic construct
  REGION 1..214: note = synthetic
DIQMTQSPSTLSASVGDRVTITCRASQSISSWLAWYQQKPGKAPKLLIYEASSLESGVPLRFSGSGSGTEFTLTISSLQPDDFATYYCQQYRQSPFTFGGGTKVEIKRTVAAPSVFIFPPSDEQLKSGTASVVCLLNNFYPREAKVQWKVDNALQSGNSQESVTEQDSKDSTYSLSSTLTLSKADYEKHKVYACEVTHQGLSSPVTKSFNRGEC

SEQ ID NO: 64 - protein, 116 aa, synthetic construct
  REGION 1..116: note = synthetic
QVQLVQSGAEVKKPGSSVKVSCKASGGTFNSYVISWVRQAPGQGLEWMGGIIPGAGTANYAQKFQGRVTITADESTSTAYMELSSLRSEDTAVYYCARGRHSHETWGQGTLVTVSS

SEQ ID NO: 65 - protein, 9 aa, synthetic construct
  REGION 1..9: note = synthetic
GTFNSYVIS

SEQ ID NO: 66 - protein, 17 aa, synthetic construct
  REGION 1..17: note = synthetic
GIIPGAGTANYAQKFQG

SEQ ID NO: 67 - protein, 9 aa, synthetic construct
  REGION 1..9: note = synthetic
ARGRHSHET

SEQ ID NO: 68 - protein, 442 aa, synthetic construct
  REGION 1..442: note = synthetic
QVQLVQSGAEVKKPGSSVKVSCKASGGTFNSYVISWVRQAPGQGLEWMGGIIPGAGTANYAQKFQGRVTITADESTSTAYMELSSLRSEDTAVYYCARGRHSHETWGQGTLVTVSSASTKGPSVFPLAPCSRSTSESTAALGCLVKDYFPEPVTVSWNSGALTSGVHTFPAVLQSSGLYSLSSVVTVPSSSLGTKTYTCNVDHKPSNTKVDKRVESKYGPPCPPCPAPEFLGGPSVFLFPPKPKDTLMISRTPEVTCVVVDVSQEDPEVQFNWYVDGVEVHNAKTKPREEQFNSTYRVVSVLTVLHQDWLNGKEYKCKVSNKGLPSSIEKTISKAKGQPREPQVYTLPPSQEEMTKNQVSLTCLVKGFYPSDIAVEWESNGQPENNYKTTPPVLDSDGSFFLYSRLTVDKSRWQEGNVFSCSVMHEALHNHYTQKSLSLSLG

SEQ ID NO: 69 - protein, 107 aa, synthetic construct
  REGION 1..107: note = synthetic
DIQMTQSPSSVSASVGDRVTITCRASQGISSWLAWYQQKPGKAPKLLIYAASSLQSGVPSRFSGSGSGTDFTLTISSLQPEDFATYYCQQVYSLPWTFGGGTKVEIK

SEQ ID NO: 70 - protein, 11 aa, synthetic construct
  REGION 1..11: note = synthetic
RASQGISSWLA

SEQ ID NO: 71 - protein, 7 aa, synthetic construct
  REGION 1..7: note = synthetic
AASSLQS

SEQ ID NO: 72 - protein, 9 aa, synthetic construct
  REGION 1..9: note = synthetic
QQVYSLPWT

SEQ ID NO: 73 - protein, 214 aa, synthetic construct
  REGION 1..214: note = synthetic
DIQMTQSPSSVSASVGDRVTITCRASQGISSWLAWYQQKPGKAPKLLIYAASSLQSGVPSRFSGSGSGTDFTLTISSLQPEDFATYYCQQVYSLPWTFGGGTKVEIKRTVAAPSVFIFPPSDEQLKSGTASVVCLLNNFYPREAKVQWKVDNALQSGNSQESVTEQDSKDSTYSLSSTLTLSKADYEKHKVYACEVTHQGLSSPVTKSFNRGEC

SEQ ID NO: 74 - protein, 116 aa, synthetic construct
  REGION 1..116: note = synthetic
QVQLVQSGAEVKKPGSSVKVSCKASGGTFSEYVISWVRQAPGQGLEWMGGIIPGAGTANYAQKFQGRVTITADESTSTAYMELSSLRSEDTAVYYCARGRHSHETWGQGTLVTVSS

SEQ ID NO: 75 - protein, 9 aa, synthetic construct
  REGION 1..9: note = synthetic
GTFSEYVIS

SEQ ID NO: 76 - protein, 17 aa, synthetic construct
  REGION 1..17: note = synthetic
GIIPGAGTANYAQKFQG

SEQ ID NO: 77 - protein, 9 aa, synthetic construct
  REGION 1..9: note = synthetic
ARGRHSHET

SEQ ID NO: 78 - protein, 442 aa, synthetic construct
  REGION 1..442: note = synthetic
QVQLVQSGAEVKKPGSSVKVSCKASGGTFSEYVISWVRQAPGQGLEWMGGIIPGAGTANYAQKFQGRVTITADESTSTAYMELSSLRSEDTAVYYCARGRHSHETWGQGTLVTVSSASTKGPSVFPLAPCSRSTSESTAALGCLVKDYFPEPVTVSWNSGALTSGVHTFPAVLQSSGLYSLSSVVTVPSSSLGTKTYTCNVDHKPSNTKVDKRVESKYGPPCPPCPAPEFLGGPSVFLFPPKPKDTLMISRTPEVTCVVVDVSQEDPEVQFNWYVDGVEVHNAKTKPREEQFNSTYRVVSVLTVLHQDWLNGKEYKCKVSNKGLPSSIEKTISKAKGQPREPQVYTLPPSQEEMTKNQVSLTCLVKGFYPSDIAVEWESNGQPENNYKTTPPVLDSDGSFFLYSRLTVDKSRWQEGNVFSCSVMHEALHNHYTQKSLSLSLG

SEQ ID NO: 79 - protein, 107 aa, synthetic construct
  REGION 1..107: note = synthetic
DIQMTQSPSSVSASVGDRVTITCRASQGISSWLAWYQQKPGKAPKLLIYAASSLQSGVPSRFSGSGSGTDFTLTIGSLQPEDFATYYCQQVYSLPWTFGGGTKVEIK

SEQ ID NO: 80 - protein, 11 aa, synthetic construct
  REGION 1..11: note = synthetic
RASQGISSWLA

SEQ ID NO: 81 - protein, 7 aa, synthetic construct
  REGION 1..7: note = synthetic
AASSLQS

SEQ ID NO: 82 - protein, 9 aa, synthetic construct
  REGION 1..9: note = synthetic
QQVYSLPWT

SEQ ID NO: 83 - protein, 214 aa, synthetic construct
  REGION 1..214: note = synthetic
DIQMTQSPSSVSASVGDRVTITCRASQGISSWLAWYQQKPGKAPKLLIYAASSLQSGVPSRFSGSGSGTDFTLTIGSLQPEDFATYYCQQVYSLPWTFGGGTKVEIKRTVAAPSVFIFPPSDEQLKSGTASVVCLLNNFYPREAKVQWKVDNALQSGNSQESVTEQDSKDSTYSLSSTLTLSKADYEKHKVYACEVTHQGLSSPVTKSFNRGEC

SEQ ID NO: 84 - protein, 116 aa, synthetic construct
  REGION 1..116: note = synthetic
QVQLVQSGAEVKKPGSSVKVSCKASGGTFSEYPISWVRQAPGQGLEWMGGIIPGAGTAIYAQKFQGRVTITADESTSTAYMELSSLRSEDTAVYYCARGRHFHETWGQGTLVTVSS

SEQ ID NO: 85 - protein, 9 aa, synthetic construct
  REGION 1..9: note = synthetic
GTFSEYPIS

SEQ ID NO: 86 - protein, 17 aa, synthetic construct
  REGION 1..17: note = synthetic
GIIPGAGTAIYAQKFQG

SEQ ID NO: 87 - protein, 9 aa, synthetic construct
  REGION 1..9: note = synthetic
ARGRHFHET

SEQ ID NO: 88 - protein, 442 aa, synthetic construct
  REGION 1..442: note = synthetic
QVQLVQSGAEVKKPGSSVKVSCKASGGTFSEYPISWVRQAPGQGLEWMGGIIPGAGTAIYAQKFQGRVTITADESTSTAYMELSSLRSEDTAVYYCARGRHFHETWGQGTLVTVSSASTKGPSVFPLAPCSRSTSESTAALGCLVKDYFPEPVTVSWNSGALTSGVHTFPAVLQSSGLYSLSSVVTVPSSSLGTKTYTCNVDHKPSNTKVDKRVESKYGPPCPPCPAPEFLGGPSVFLFPPKPKDTLMISRTPEVTCVVVDVSQEDPEVQFNWYVDGVEVHNAKTKPREEQFNSTYRVVSVLTVLHQDWLNGKEYKCKVSNKGLPSSIEKTISKAKGQPREPQVYTLPPSQEEMTKNQVSLTCLVKGFYPSDIAVEWESNGQPENNYKTTPPVLDSDGSFFLYSRLTVDKSRWQEGNVFSCSVMHEALHNHYTQKSLSLSLG

SEQ ID NO: 89 - protein, 107 aa, synthetic construct
  REGION 1..107: note = synthetic
DIQMTQSPSSVSASVGDRVTITCRASQGISSWLAWYQQKPGKAPKLLIYAASSLQSGVPSRFSGSGSGTDFTLTISSLQPEDFATYYCQQVYRFPWTFGGGTKVEIK

SEQ ID NO: 90 - protein, 11 aa, synthetic construct
  REGION 1..11: note = synthetic
RASQGISSWLA

SEQ ID NO: 91 - protein, 7 aa, synthetic construct
  REGION 1..7: note = synthetic
AASSLQS

SEQ ID NO: 92 - protein, 9 aa, synthetic construct
  REGION 1..9: note = synthetic
QQVYRFPWT

SEQ ID NO: 93 - protein, 214 aa, synthetic construct
  REGION 1..214: note = synthetic
DIQMTQSPSSVSASVGDRVTITCRASQGISSWLAWYQQKPGKAPKLLIYAASSLQSGVPSRFSGSGSGTDFTLTISSLQPEDFATYYCQQVYRFPWTFGGGTKVEIKRTVAAPSVFIFPPSDEQLKSGTASVVCLLNNFYPREAKVQWKVDNALQSGNSQESVTEQDSKDSTYSLSSTLTLSKADYEKHKVYACEVTHQGLSSPVTKSFNRGEC

SEQ ID NO: 94 - protein, 124 aa, synthetic construct
  REGION 1..124: note = synthetic
QVQLVQSGAEVKKPGASVKVSCKASGYTFNSYAMHWVRQAPGQRLEWMGWIHAGTGNTKYSQKFQGRVTITRDTSASTAYMELSSLRSEDTAVYYCARGLGEVGPTGTSWFDPWGQGTLVTVSS

SEQ ID NO: 95 - protein, 9 aa, synthetic construct
  REGION 1..9: note = synthetic
YTFNSYAMH

SEQ ID NO: 96 - protein, 17 aa, synthetic construct
  REGION 1..17: note = synthetic
WIHAGTGNTKYSQKFQG

SEQ ID NO: 97 - protein, 17 aa, synthetic construct
  REGION 1..17: note = synthetic
ARGLGEVGPTGTSWFDP

SEQ ID NO: 98 - protein, 450 aa, synthetic construct
  REGION 1..450: note = synthetic
QVQLVQSGAEVKKPGASVKVSCKASGYTFNSYAMHWVRQAPGQRLEWMGWIHAGTGNTKYSQKFQGRVTITRDTSASTAYMELSSLRSEDTAVYYCARGLGEVGPTGTSWFDPWGQGTLVTVSSASTKGPSVFPLAPCSRSTSESTAALGCLVKDYFPEPVTVSWNSGALTSGVHTFPAVLQSSGLYSLSSVVTVPSSSLGTKTYTCNVDHKPSNTKVDKRVESKYGPPCPPCPAPEFLGGPSVFLFPPKPKDTLMISRTPEVTCVVVDVSQEDPEVQFNWYVDGVEVHNAKTKPREEQFNSTYRVVSVLTVLHQDWLNGKEYKCKVSNKGLPSSIEKTISKAKGQPREPQVYTLPPSQEEMTKNQVSLTCLVKGFYPSDIAVEWESNGQPENNYKTTPPVLDSDGSFFLYSRLTVDKSRWQEGNVFSCSVMHEALHNHYTQKSLSLSLG

SEQ ID NO: 99 - protein, 107 aa, synthetic construct
  REGION 1..107: note = synthetic
DIQMTQSPPTLSASVGDRVTITCRASQSISSWLAWYQQKPGKAPKLLIYEASSLESGVPSRFSGSGSGTEFTLTISSLQPDDFATYYCQQYRVFPFTFGGGTKVEIK

SEQ ID NO: 100 - protein, 11 aa, synthetic construct
  REGION 1..11: note = synthetic
RASQSISSWLA

SEQ ID NO: 101 - protein, 7 aa, synthetic construct
  REGION 1..7: note = synthetic
EASSLES

SEQ ID NO: 102 - protein, 9 aa, synthetic construct
  REGION 1..9: note = synthetic
QQYRVFPFT

SEQ ID NO: 103 - protein, 214 aa, synthetic construct
  REGION 1..214: note = synthetic
DIQMTQSPPTLSASVGDRVTITCRASQSISSWLAWYQQKPGKAPKLLIYEASSLESGVPSRFSGSGSGTEFTLTISSLQPDDFATYYCQQYRVFPFTFGGGTKVEIKRTVAAPSVFIFPPSDEQLKSGTASVVCLLNNFYPREAKVQWKVDNALQSGNSQESVTEQDSKDSTYSLSSTLTLSKADYEKHKVYACEVTHQGLSSPVTKSFNRGEC

SEQ ID NO: 104 - protein, 118 aa, synthetic construct
  REGION 1..118: note = synthetic
EVQLLESGGGLVQPGGSLRLSCAASGFTFGNTAMSWVRQAPGKGLEWVSAISANAGSTYYADSVKGRFTISRDNSKNTLYLQMNSLRAEDTAVYYCAKGPDRQVFDYWGQGTLVTVSS

SEQ ID NO: 105 - protein, 9 aa, synthetic construct
  REGION 1..9: note = synthetic
FTFGNTAMS

SEQ ID NO: 106 - protein, 17 aa, synthetic construct
  REGION 1..17: note = synthetic
AISANAGSTYYADSVKG

SEQ ID NO: 107 - protein, 11 aa, synthetic construct
  REGION 1..11: note = synthetic
AKGPDRQVFDY

SEQ ID NO: 108 - protein, 444 aa, synthetic construct
  REGION 1..444: note = synthetic
EVQLLESGGGLVQPGGSLRLSCAASGFTFGNTAMSWVRQAPGKGLEWVSAISANAGSTYYADSVKGRFTISRDNSKNTLYLQMNSLRAEDTAVYYCAKGPDRQVFDYWGQGTLVTVSSASTKGPSVFPLAPCSRSTSESTAALGCLVKDYFPEPVTVSWNSGALTSGVHTFPAVLQSSGLYSLSSVVTVPSSSLGTKTYTCNVDHKPSNTKVDKRVESKYGPPCPPCPAPEFLGGPSVFLFPPKPKDTLMISRTPEVTCVVVDVSQEDPEVQFNWYVDGVEVHNAKTKPREEQFNSTYRVVSVLTVLHQDWLNGKEYKCKVSNKGLPSSIEKTISKAKGQPREPQVYTLPPSQEEMTKNQVSLTCLVKGFYPSDIAVEWESNGQPENNYKTTPPVLDSDGSFFLYSRLTVDKSRWQEGNVFSCSVMHEALHNHYTQKSLSLSLG

SEQ ID NO: 109 - protein, 107 aa, synthetic construct
  REGION 1..107: note = synthetic
DIQMTQSPSSVSASVGDRVTITCRASQGISSWLAWYQQKPGKAPKLLIYAASSLQSGVPSRFSGSGSGTDFTLTISSLQPEDFATYYCQHALFFPYTFGGGTKVEIK

SEQ ID NO: 110 - protein, 11 aa, synthetic construct
  REGION 1..11: note = synthetic
RASQGISSWLA

SEQ ID NO: 111 - protein, 7 aa, synthetic construct
  REGION 1..7: note = synthetic
AASSLQS

SEQ ID NO: 112 - protein, 9 aa, synthetic construct
  REGION 1..9: note = synthetic
QHALFFPYT

SEQ ID NO: 113 - protein, 214 aa, synthetic construct
  REGION 1..214: note = synthetic
DIQMTQSPSSVSASVGDRVTITCRASQGISSWLAWYQQKPGKAPKLLIYAASSLQSGVPSRFSGSGSGTDFTLTISSLQPEDFATYYCQHALFFPYTFGGGTKVEIKRTVAAPSVFIFPPSDEQLKSGTASVVCLLNNFYPREAKVQWKVDNALQSGNSQESVTEQDSKDSTYSLSSTLTLSKADYEKHKVYACEVTHQGLSSPVTKSFNRGEC

SEQ ID NO: 114 - protein, 118 aa, synthetic construct
  REGION 1..118: note = synthetic
EVQLLESGGGLVQPGGSLRLSCAASGFTFDNVAMSWVRQAPGKGLEWVSAISGNAGSTYYADSVKGRFTISRDNSKNTLHLQMNSLRAEDTAVYYCAKGPDRQVFDYWGQGTLVTVSS

SEQ ID NO: 115 - protein, 9 aa, synthetic construct
  REGION 1..9: note = synthetic
FTFDNVAMS

SEQ ID NO: 116 - protein, 17 aa, synthetic construct
  REGION 1..17: note = synthetic
AISGNAGSTYYADSVKG

SEQ ID NO: 117 - protein, 11 aa, synthetic construct
  REGION 1..11: note = synthetic
AKGPDRQVFDY

SEQ ID NO: 118 - protein, 444 aa, synthetic construct
  REGION 1..444: note = synthetic
EVQLLESGGGLVQPGGSLRLSCAASGFTFDNVAMSWVRQAPGKGLEWVSAISGNAGSTYYADSVKGRFTISRDNSKNTLHLQMNSLRAEDTAVYYCAKGPDRQVFDYWGQGTLVTVSSASTKGPSVFPLAPCSRSTSESTAALGCLVKDYFPEPVTVSWNSGALTSGVHTFPAVLQSSGLYSLSSVVTVPSSSLGTKTYTCNVDHKPSNTKVDKRVESKYGPPCPPCPAPEFLGGPSVFLFPPKPKDTLMISRTPEVTCVVVDVSQEDPEVQFNWYVDGVEVHNAKTKPREEQFNSTYRVVSVLTVLHQDWLNGKEYKCKVSNKGLPSSIEKTISKAKGQPREPQVYTLPPSQEEMTKNQVSLTCLVKGFYPSDIAVEWESNGQPENNYKTTPPVLDSDGSFFLYSRLTVDKSRWQEGNVFSCSVMHEALHNHYTQKSLSLSLG

SEQ ID NO: 119 - protein, 107 aa, synthetic construct
  REGION 1..107: note = synthetic
DIQMTQSPSSVSASVGDRVTITCRASQGISSWLAWYQQKPGKAPKLLIYAASSLQSGVPSRFSGSGSGTDFTLTISSLQPEDFATYYCQHAYSFPYTFGGGTKVEIK

SEQ ID NO: 120 - protein, 11 aa, synthetic construct
  REGION 1..11: note = synthetic
RASQGISSWLA

SEQ ID NO: 121 - protein, 7 aa, synthetic construct
  REGION 1..7: note = synthetic
AASSLQS

SEQ ID NO: 122 - protein, 9 aa, synthetic construct
  REGION 1..9: note = synthetic
QHAYSFPYT

SEQ ID NO: 123 - protein, 214 aa, synthetic construct
  REGION 1..214: note = synthetic
DIQMTQSPSSVSASVGDRVTITCRASQGISSWLAWYQQKPGKAPKLLIYAASSLQSGVPSRFSGSGSGTDFTLTISSLQPEDFATYYCQHAYSFPYTFGGGTKVEIKRTVAAPSVFIFPPSDEQLKSGTASVVCLLNNFYPREAKVQWKVDNALQSGNSQESVTEQDSKDSTYSLSSTLTLSKADYEKHKVYACEVTHQGLSSPVTKSFNRGEC

SEQ ID NO: 124 - protein, 118 aa, synthetic construct
  REGION 1..118: note = synthetic
EVQLLESGGGLVQPGGSLRLSCAASGFTFSNYAMSWVRQAPGKGLEWVSAISGSGGSTYYADSVKGRFTISRDNSKNTLYLQMNSLRAEDTAVYYCAKGPDRQVFDYWGQGTLVTVSS

SEQ ID NO: 125 - protein, 9 aa, synthetic construct
  REGION 1..9: note = synthetic
FTFSNYAMS

SEQ ID NO: 126 - protein, 17 aa, synthetic construct
  REGION 1..17: note = synthetic
AISGSGGSTYYADSVKG

SEQ ID NO: 127 - protein, 11 aa, synthetic construct
  REGION 1..11: note = synthetic
AKGPDRQVFDY

SEQ ID NO: 128 - protein, 444 aa, synthetic construct
  REGION 1..444: note = synthetic
EVQLLESGGGLVQPGGSLRLSCAASGFTFSNYAMSWVRQAPGKGLEWVSAISGSGGSTYYADSVKGRFTISRDNSKNTLYLQMNSLRAEDTAVYYCAKGPDRQVFDYWGQGTLVTVSSASTKGPSVFPLAPCSRSTSESTAALGCLVKDYFPEPVTVSWNSGALTSGVHTFPAVLQSSGLYSLSSVVTVPSSSLGTKTYTCNVDHKPSNTKVDKRVESKYGPPCPPCPAPEFLGGPSVFLFPPKPKDTLMISRTPEVTCVVVDVSQEDPEVQFNWYVDGVEVHNAKTKPREEQFNSTYRVVSVLTVLHQDWLNGKEYKCKVSNKGLPSSIEKTISKAKGQPREPQVYTLPPSQEEMTKNQVSLTCLVKGFYPSDIAVEWESNGQPENNYKTTPPVLDSDGSFFLYSRLTVDKSRWQEGNVFSCSVMHEALHNHYTQKSLSLSLG

SEQ ID NO: 129 - protein, 107 aa, synthetic construct
  REGION 1..107: note = synthetic
DIQMTQSPSSVSASVGDRVTITCRASQGIDSWLAWYQQKPGKAPKLLIYAASSLQSGVPSRFSGSGSGTDFTLTISSLQPEDFATYYCQHAYSFPYTFGGGTKVEIK

SEQ ID NO: 130 - protein, 11 aa, synthetic construct
  REGION 1..11: note = synthetic
RASQGIDSWLA

SEQ ID NO: 131 - protein, 7 aa, synthetic construct
  REGION 1..7: note = synthetic
AASSLQS

SEQ ID NO: 132 - protein, 9 aa, synthetic construct
  REGION 1..9: note = synthetic
QHAYSFPYT

SEQ ID NO: 133 - protein, 214 aa, synthetic construct
  REGION 1..214: note = synthetic
DIQMTQSPSSVSASVGDRVTITCRASQGIDSWLAWYQQKPGKAPKLLIYAASSLQSGVPSRFSGSGSGTDFTLTISSLQPEDFATYYCQHAYSFPYTFGGGTKVEIKRTVAAPSVFIFPPSDEQLKSGTASVVCLLNNFYPREAKVQWKVDNALQSGNSQESVTEQDSKDSTYSLSSTLTLSKADYEKHKVYACEVTHQGLSSPVTKSFNRGEC

SEQ ID NO: 134 - protein, 124 aa, synthetic construct
  REGION 1..124: note = synthetic
QVQLVQSGAEVKKPGASVKVSCKASGYTFGIYAMHWVRQAPGQRLEWMGWIHAGTGVTKYSQKFQGRVTITRDTSASTAYMELSSLRSEDTAVYYCARGLGEVGPTGTSWFDPWGQGTLVTVSS

SEQ ID NO: 135 - protein, 9 aa, synthetic construct
  REGION 1..9: note = synthetic
YTFGIYAMH

SEQ ID NO: 136 - protein, 17 aa, synthetic construct
  REGION 1..17: note = synthetic
WIHAGTGVTKYSQKFQG

SEQ ID NO: 137 - protein, 17 aa, synthetic construct
  REGION 1..17: note = synthetic
ARGLGEVGPTGTSWFDP

SEQ ID NO: 138 - protein, 450 aa, synthetic construct
  REGION 1..450: note = synthetic
QVQLVQSGAEVKKPGASVKVSCKASGYTFGIYAMHWVRQAPGQRLEWMGWIHAGTGVTKYSQKFQGRVTITRDTSASTAYMELSSLRSEDTAVYYCARGLGEVGPTGTSWFDPWGQGTLVTVSSASTKGPSVFPLAPCSRSTSESTAALGCLVKDYFPEPVTVSWNSGALTSGVHTFPAVLQSSGLYSLSSVVTVPSSSLGTKTYTCNVDHKPSNTKVDKRVESKYGPPCPPCPAPEFLGGPSVFLFPPKPKDTLMISRTPEVTCVVVDVSQEDPEVQFNWYVDGVEVHNAKTKPREEQFNSTYRVVSVLTVLHQDWLNGKEYKCKVSNKGLPSSIEKTISKAKGQPREPQVYTLPPSQEEMTKNQVSLTCLVKGFYPSDIAVEWESNGQPENNYKTTPPVLDSDGSFFLYSRLTVDKSRWQEGNVFSCSVMHEALHNHYTQKSLSLSLG

SEQ ID NO: 139 - protein, 107 aa, synthetic construct
  REGION 1..107: note = synthetic
DIQMTQSPSTLSASVGDRVTITCRASQSISSWLAWYQQKPGKAPKLLIYEASSLESGVPSRFSGSGSGTEFTLTISSLQPDDFATYYCQQYRYSPFTFGGGTKVEIK

SEQ ID NO: 140 - protein, 11 aa, synthetic construct
  REGION 1..11: note = synthetic
RASQSISSWLA

SEQ ID NO: 141 - protein, 7 aa, synthetic construct
  REGION 1..7: note = synthetic
EASSLES

SEQ ID NO: 142 - protein, 9 aa, synthetic construct
  REGION 1..9: note = synthetic
QQYRYSPFT

SEQ ID NO: 143 - protein, 214 aa, synthetic construct
  REGION 1..214: note = synthetic
DIQMTQSPSTLSASVGDRVTITCRASQSISSWLAWYQQKPGKAPKLLIYEASSLESGVPSRFSGSGSGTEFTLTISSLQPDDFATYYCQQYRYSPFTFGGGTKVEIKRTVAAPSVFIFPPSDEQLKSGTASVVCLLNNFYPREAKVQWKVDNALQSGNSQESVTEQDSKDSTYSLSSTLTLSKADYEKHKVYACEVTHQGLSSPVTKSFNRGEC

SEQ ID NO: 144 - protein, 124 aa, synthetic construct
  REGION 1..124: note = synthetic
QVQLVQSGAEVKKPGASVKVSCKASGYTFKQYAMHWVRQAPGQRLEWMGWIHAGTGNTKYSQKFQGRVTITRDTSASTAYMELSSLRSEDTAVYYCARGLGSVGPTGTSWFDPWGQGTLVTVSS

SEQ ID NO: 145 - protein, 9 aa, synthetic construct
  REGION 1..9: note = synthetic
YTFKQYAMH

SEQ ID NO: 146 - protein, 17 aa, synthetic construct
  REGION 1..17: note = sfynthetic
WIHAGTGNTKYSQKFQG

SEQ ID NO: 147 - protein, 17 aa, synthetic construct
  REGION 1..17: note = synthetic
ARGLGSVGPTGTSWFDP

SEQ ID NO: 148 - protein, 450 aa, synthetic construct
  REGION 1..450: note = synthetic
QVQLVQSGAEVKKPGASVKVSCKASGYTFKQYAMHWVRQAPGQRLEWMGWIHAGTGNTKYSQKFQGRVTITRDTSASTAYMELSSLRSEDTAVYYCARGLGSVGPTGTSWFDPWGQGTLVTVSSASTKGPSVFPLAPCSRSTSESTAALGCLVKDYFPEPVTVSWNSGALTSGVHTFPAVLQSSGLYSLSSVVTVPSSSLGTKTYTCNVDHKPSNTKVDKRVESKYGPPCPPCPAPEFLGGPSVFLFPPKPKDTLMISRTPEVTCVVVDVSQEDPEVQFNWYVDGVEVHNAKTKPREEQFNSTYRVVSVLTVLHQDWLNGKEYKCKVSNKGLPSSIEKTISKAKGQPREPQVYTLPPSQEEMTKNQVSLTCLVKGFYPSDIAVEWESNGQPENNYKTTPPVLDSDGSFFLYSRLTVDKSRWQEGNVFSCSVMHEALHNHYTQKSLSLSLG

SEQ ID NO: 149 - protein, 107 aa, synthetic construct
  REGION 1..107: note = synthetic
DIQMTQSPSTLSASVGDRVTITCRASQSISSWLAWYQQKPGKAPKLLIYEASSLESGVPSRFSGSGSGTEFTLTISSLQPDDFATYYCQQYRSGPFTFGGGTKVEIK

SEQ ID NO: 150 - protein, 11 aa, synthetic construct
  REGION 1..11: note = synthetic
RASQSISSWLA

SEQ ID NO: 151 - protein, 7 aa, synthetic construct
  REGION 1..7: note = synthetic
EASSLES

SEQ ID NO: 152 - protein, 9 aa, synthetic construct
  REGION 1..9: note = synthetic
QQYRSGPFT

SEQ ID NO: 153 - protein, 214 aa, synthetic construct
  REGION 1..214: note = synthetic
DIQMTQSPSTLSASVGDRVTITCRASQSISSWLAWYQQKPGKAPKLLIYEASSLESGVPSRFSGSGSGTEFTLTISSLQPDDFATYYCQQYRSGPFTFGGGTKVEIKRTVAAPSVFIFPPSDEQLKSGTASVVCLLNNFYPREAKVQWKVDNALQSGNSQESVTEQDSKDSTYSLSSTLTLSKADYEKHKVYACEVTHQGLSSPVTKSFNRGEC

SEQ ID NO: 154 - protein, 119 aa, synthetic construct
  REGION 1..119: note = synthetic
QLQLQESGPGLVKPSETLSLTCTVSGGSISSPDYPWGWIRQPPGKGLEWIGSIYYQGATYYNPSLKSRVTISVDTSKNQFSLKLSSVTAADTAVYYCARGPYRQLFDYWGQGTLVTVSS

SEQ ID NO: 155 - protein, 11 aa, synthetic construct
  REGION 1..11: note = synthetic
GSISSPDYPWG

SEQ ID NO: 156 - protein, 16 aa, synthetic construct
  REGION 1..16: note = synthetic
SIYYQGATYYNPSLKS

SEQ ID NO: 157 - protein, 11 aa, synthetic construct
  REGION 1..11: note = synthetic
ARGPYRQLFDY

SEQ ID NO: 158 - protein, 445 aa, synthetic construct
  REGION 1..445: note = synthetic
QLQLQESGPGLVKPSETLSLTCTVSGGSISSPDYPWGWIRQPPGKGLEWIGSIYYQGATYYNPSLKSRVTISVDTSKNQFSLKLSSVTAADTAVYYCARGPYRQLFDYWGQGTLVTVSSASTKGPSVFPLAPCSRSTSESTAALGCLVKDYFPEPVTVSWNSGALTSGVHTFPAVLQSSGLYSLSSVVTVPSSSLGTKTYTCNVDHKPSNTKVDKRVESKYGPPCPPCPAPEFLGGPSVFLFPPKPKDTLMISRTPEVTCVVVDVSQEDPEVQFNWYVDGVEVHNAKTKPREEQFNSTYRVVSVLTVLHQDWLNGKEYKCKVSNKGLPSSIEKTISKAKGQPREPQVYTLPPSQEEMTKNQVSLTCLVKGFYPSDIAVEWESNGQPENNYKTTPPVLDSDGSFFLYSRLTVDKSRWQEGNVFSCSVMHEALHNHYTQKSLSLSLG

SEQ ID NO: 159 - protein, 107 aa, synthetic construct
  REGION 1..107: note = synthetic
DIQMTQSPSSVSASVGDRVTITCRASQGISSWLAWYQQKPGKAPKLLIYAASSLQSGVPSRFSGSGSGTDFTLTISSLQPEDFATYYCQQGSVFPYTFGGGTKVEIK

SEQ ID NO: 160 - protein, 11 aa, synthetic construct
  REGION 1..11: note = synthetic
RASQGISSWLA

SEQ ID NO: 161 - protein, 7 aa, synthetic construct
  REGION 1..7: note = synthetic
AASSLQS

SEQ ID NO: 162 - protein, 9 aa, synthetic construct
  REGION 1..9: note = synthetic
QQGSVFPYT

SEQ ID NO: 163 - protein, 214 aa, synthetic construct
  REGION 1..214: note = synthetic
DIQMTQSPSSVSASVGDRVTITCRASQGISSWLAWYQQKPGKAPKLLIYAASSLQSGVPSRFSGSGSGTDFTLTISSLQPEDFATYYCQQGSVFPYTFGGGTKVEIKRTVAAPSVFIFPPSDEQLKSGTASVVCLLNNFYPREAKVQWKVDNALQSGNSQESVTEQDSKDSTYSLSSTLTLSKADYEKHKVYACEVTHQGLSSPVTKSFNRGEC

SEQ ID NO: 164 - protein, 119 aa, synthetic construct
  REGION 1..119: note = synthetic
QLQLQESGPGLVKPSETLSLTCTVSGGSISSSEYGWGWIRQPPGKGLEWIGSIVNSGSTYYNPSLKSRVTISVDTSKNQFSLKLSSVTAADTAVYYCARGPHRQVFDYWGQGTLVTVSS

SEQ ID NO: 165 - protein, 11 aa, synthetic construct
  REGION 1..11: note = synthetic
GSISSSEYGWG

SEQ ID NO: 166 - protein, 16 aa, synthetic construct
  REGION 1..16: note = synthetic
SIVNSGSTYYNPSLKS

SEQ ID NO: 167 - protein, 11 aa, synthetic construct
  REGION 1..11: note = synthetic
ARGPHRQVFDY

SEQ ID NO: 168 - protein, 445 aa, synthetic construct
  REGION 1..445: note = synthetic
QLQLQESGPGLVKPSETLSLTCTVSGGSISSSEYGWGWIRQPPGKGLEWIGSIVNSGSTYYNPSLKSRVTISVDTSKNQFSLKLSSVTAADTAVYYCARGPHRQVFDYWGQGTLVTVSSASTKGPSVFPLAPCSRSTSESTAALGCLVKDYFPEPVTVSWNSGALTSGVHTFPAVLQSSGLYSLSSVVTVPSSSLGTKTYTCNVDHKPSNTKVDKRVESKYGPPCPPCPAPEFLGGPSVFLFPPKPKDTLMISRTPEVTCVVVDVSQEDPEVQFNWYVDGVEVHNAKTKPREEQFNSTYRVVSVLTVLHQDWLNGKEYKCKVSNKGLPSSIEKTISKAKGQPREPQVYTLPPSQEEMTKNQVSLTCLVKGFYPSDIAVEWESNGQPENNYKTTPPVLDSDGSFFLYSRLTVDKSRWQEGNVFSCSVMHEALHNHYTQKSLSLSLG

SEQ ID NO: 169 - protein, 107 aa, synthetic construct
  REGION 1..107: note = synthetic
DIQMTQSPSSVSASVGDRVTITCRASQGISSWLAWYQQKPGKAPKHLIYAASSLQSGVPSRFSGSGSGTDFTLTISSLQPEDFATYYCQQGFSFPYTFGGGTKVEIK

SEQ ID NO: 170 - protein, 11 aa, synthetic construct
  REGION 1..11: note = synthetic
RASQGISSWLA

SEQ ID NO: 171 - protein, 7 aa, synthetic construct
  REGION 1..7: note = synthetic
AASSLQS

SEQ ID NO: 172 - protein, 9 aa, synthetic construct
  REGION 1..9: note = synthetic
QQGFSFPYT

SEQ ID NO: 173 - protein, 214 aa, synthetic construct
  REGION 1..214: note = 174
DIQMTQSPSSVSASVGDRVTITCRASQGISSWLAWYQQKPGKAPKHLIYAASSLQSGVPSRFSGSGSGTDFTLTISSLQPEDFATYYCQQGFSFPYTFGGGTKVEIKRTVAAPSVFIFPPSDEQLKSGTASVVCLLNNFYPREAKVQWKVDNALQSGNSQESVTEQDSKDSTYSLSSTLTLSKADYEKHKVYACEVTHQGLSSPVTKSFNRGEC

SEQ ID NO: 174 - protein, 124 aa, synthetic construct
  REGION 1..124: note = synthetic
QVQLVQSGAEVKKPGASVKVSCKASGYTFRHYAMHWVRQAPGQRLEWMGWIHAGTGNTLYSQKFQGRVTITRDTSASTAYMELSSLRSEDTAVYYCARGLGEVGPTGTSWFDPWGQGTLVTVSS

SEQ ID NO: 175 - protein, 9 aa, synthetic construct
  REGION 1..9: note = synthetic
YTFRHYAMH

SEQ ID NO: 176 - protein, 17 aa, synthetic construct
  REGION 1..17: note = synthetic
WIHAGTGNTLYSQKFQG

SEQ ID NO: 177 - protein, 17 aa, synthetic construct
  REGION 1..17: note = synthetic
ARGLGEVGPTGTSWFDP

SEQ ID NO: 178 - protein, 450 aa, synthetic construct
  REGION 1..450: note = synthetic
QVQLVQSGAEVKKPGASVKVSCKASGYTFRHYAMHWVRQAPGQRLEWMGWIHAGTGNTLYSQKFQGRVTITRDTSASTAYMELSSLRSEDTAVYYCARGLGEVGPTGTSWFDPWGQGTLVTVSSASTKGPSVFPLAPCSRSTSESTAALGCLVKDYFPEPVTVSWNSGALTSGVHTFPAVLQSSGLYSLSSVVTVPSSSLGTKTYTCNVDHKPSNTKVDKRVESKYGPPCPPCPAPEFLGGPSVFLFPPKPKDTLMISRTPEVTCVVVDVSQEDPEVQFNWYVDGVEVHNAKTKPREEQFNSTYRVVSVLTVLHQDWLNGKEYKCKVSNKGLPSSIEKTISKAKGQPREPQVYTLPPSQEEMTKNQVSLTCLVKGFYPSDIAVEWESNGQPENNYKTTPPVLDSDGSFFLYSRLTVDKSRWQEGNVFSCSVMHEALHNHYTQKSLSLSLG

SEQ ID NO: 179 - protein, 107 aa, synthetic construct
  REGION 1..107: note = synthetic
DIQMTQSPSTLSASVGDRVTITCRASQSISSWLAWYQQKPGKAPKLLIYEASSLESGVPSRFSGSGSGTEFTLTISSLQPDDFATYYCQQYRLGPFTFGGGTKVEIK

SEQ ID NO: 180 - protein, 11 aa, synthetic construct
  REGION 1..11: note = synthetic
RASQSISSWLA

SEQ ID NO: 181 - protein, 7 aa, synthetic construct
  REGION 1..7: note = synthetic
EASSLES

SEQ ID NO: 182 - protein, 9 aa, synthetic construct
  REGION 1..9: note = synthetic
QQYRLGPFT

SEQ ID NO: 183 - protein, 214 aa, synthetic construct
  REGION 1..214: note = synthetic
DIQMTQSPSTLSASVGDRVTITCRASQSISSWLAWYQQKPGKAPKLLIYEASSLESGVPSRFSGSGSGTEFTLTISSLQPDDFATYYCQQYRLGPFTFGGGTKVEIKRTVAAPSVFIFPPSDEQLKSGTASVVCLLNNFYPREAKVQWKVDNALQSGNSQESVTEQDSKDSTYSLSSTLTLSKADYEKHKVYACEVTHQGLSSPVTKSFNRGEC

SEQ ID NO: 184 - protein, 119 aa, synthetic construct
  REGION 1..119: note = synthetic
QLQLQESGPGLVKPSETLSLTCTVSGGSISSSDYYWGWIRQPPGKGLEWIGSIYYSGSTYYNPSLKSRVTISVDTSKNQFSLKLSSVTAADTAVYYCARGPHRQVFDYWGQGTLVTVSS

SEQ ID NO: 185 - protein, 11 aa, synthetic construct
  REGION 1..11: note = synthetic
GSISSSDYYWG

SEQ ID NO: 186 - protein, 16 aa, synthetic construct
  REGION 1..16: note = synthetic
SIYYSGSTYYNPSLKS

SEQ ID NO: 187 - protein, 11 aa, synthetic construct
  REGION 1..11: note = synthetic
ARGPHRQVFDY

SEQ ID NO: 188 - protein, 445 aa, synthetic construct
  REGION 1..445: note = synthetic
QLQLQESGPGLVKPSETLSLTCTVSGGSISSSDYYWGWIRQPPGKGLEWIGSIYYSGSTYYNPSLKSRVTISVDTSKNQFSLKLSSVTAADTAVYYCARGPHRQVFDYWGQGTLVTVSSASTKGPSVFPLAPCSRSTSESTAALGCLVKDYFPEPVTVSWNSGALTSGVHTFPAVLQSSGLYSLSSVVTVPSSSLGTKTYTCNVDHKPSNTKVDKRVESKYGPPCPPCPAPEFLGGPSVFLFPPKPKDTLMISRTPEVTCVVVDVSQEDPEVQFNWYVDGVEVHNAKTKPREEQFNSTYRVVSVLTVLHQDWLNGKEYKCKVSNKGLPSSIEKTISKAKGQPREPQVYTLPPSQEEMTKNQVSLTCLVKGFYPSDIAVEWESNGQPENNYKTTPPVLDSDGSFFLYSRLTVDKSRWQEGNVFSCSVMHEALHNHYTQKSLSLSLG

SEQ ID NO: 189 - protein, 107 aa, synthetic construct
  REGION 1..107: note = synthetic
DIQMTQSPSSVSASVGDRVTITCRASQGISSWLAWYQQKPGKAPKLLIYAASSLQSGVPSRFSGSGSGTDFTLTISSLQPEDFATYYCQQGSSFPYTFGGGTKVEIK

SEQ ID NO: 190 - protein, 11 aa, synthetic construct
  REGION 1..11: note = synthetic
RASQGISSWLA

SEQ ID NO: 191 - protein, 7 aa, synthetic construct
  REGION 1..7: note = synthetic
AASSLQS

SEQ ID NO: 192 - protein, 9 aa, synthetic construct
  REGION 1..9: note = synthetic
QQGSSFPYT

SEQ ID NO: 193 - protein, 214 aa, synthetic construct
  REGION 1..214: note = synthetic
DIQMTQSPSSVSASVGDRVTITCRASQGISSWLAWYQQKPGKAPKLLIYAASSLQSGVPSRFSGSGSGTDFTLTISSLQPEDFATYYCQQGSSFPYTFGGGTKVEIKRTVAAPSVFIFPPSDEQLKSGTASVVCLLNNFYPREAKVQWKVDNALQSGNSQESVTEQDSKDSTYSLSSTLTLSKADYEKHKVYACEVTHQGLSSPVTKSFNRGEC

SEQ ID NO: 194 - protein, 116 aa, synthetic construct
  REGION 1..116: note = synthetic
QVQLVQSGAEVKKPGSSVKVSCKASGGTFSEYPISWVRQAPGQGLEWMGGIIPYSGTAVYAQKFQGRVTITADESTSTAYMELSSLRSEDTAVYYCARGRHGHETWGQGTLVTVSS

SEQ ID NO: 195 - protein, 9 aa, synthetic construct
  REGION 1..9: note = synthetic
GTFSEYPIS

SEQ ID NO: 196 - protein, 17 aa, synthetic construct
  REGION 1..17: note = synthetic
GIIPYSGTAVYAQKFQG

SEQ ID NO: 197 - protein, 9 aa, synthetic construct
  REGION 1..9: note = synthetic
ARGRHGHET

SEQ ID NO: 198 - protein, 442 aa, synthetic construct
  REGION 1..442: note = synthetic
QVQLVQSGAEVKKPGSSVKVSCKASGGTFSEYPISWVRQAPGQGLEWMGGIIPYSGTAVYAQKFQGRVTITADESTSTAYMELSSLRSEDTAVYYCARGRHGHETWGQGTLVTVSSASTKGPSVFPLAPCSRSTSESTAALGCLVKDYFPEPVTVSWNSGALTSGVHTFPAVLQSSGLYSLSSVVTVPSSSLGTKTYTCNVDHKPSNTKVDKRVESKYGPPCPPCPAPEFLGGPSVFLFPPKPKDTLMISRTPEVTCVVVDVSQEDPEVQFNWYVDGVEVHNAKTKPREEQFNSTYRVVSVLTVLHQDWLNGKEYKCKVSNKGLPSSIEKTISKAKGQPREPQVYTLPPSQEEMTKNQVSLTCLVKGFYPSDIAVEWESNGQPENNYKTTPPVLDSDGSFFLYSRLTVDKSRWQEGNVFSCSVMHEALHNHYTQKSLSLSLG

SEQ ID NO: 199 - protein, 107 aa, synthetic construct
  REGION 1..107: note = synthetic
DIQMTQSPSSVSASVGDRVTITCRASQGISSWLAWYQQKPGKAPKLLIYAASSLQSGVPSRFSGSGSGTDFTLTISSLQPEDFATYYCQQVYSIPWTFGGGTKVEIK

SEQ ID NO: 200 - protein, 11 aa, synthetic construct
  REGION 1..11: note = synthetic
RASQGISSWLA

SEQ ID NO: 201 - protein, 7 aa, synthetic construct
  REGION 1..7: note = synthetic
AASSLQS

SEQ ID NO: 202 - protein, 9 aa, synthetic construct
  REGION 1..9: note = synthetic
QQVYSIPWT

SEQ ID NO: 203 - protein, 214 aa, synthetic construct
  REGION 1..214: note = synthetic
DIQMTQSPSSVSASVGDRVTITCRASQGISSWLAWYQQKPGKAPKLLIYAASSLQSGVPSRFSGSGSGTDFTLTISSLQPEDFATYYCQQVYSIPWTFGGGTKVEIKRTVAAPSVFIFPPSDEQLKSGTASVVCLLNNFYPREAKVQWKVDNALQSGNSQESVTEQDSKDSTYSLSSTLTLSKADYEKHKVYACEVTHQGLSSPVTKSFNRGEC

SEQ ID NO: 204 - protein, 119 aa, synthetic construct
  REGION 1..119: note = synthetic
QLQLQESGPGLVKPSETLSLTCTVSGGSISSSDYPWGWIRQPPGKGLEWIGSIYYSGSTYYNPSLKSRVTISVDTSKNQFSLKLSSVTAADTAVYYCARGPYRQVFDYWGQGTLVTVSS

SEQ ID NO: 205 - protein, 11 aa, synthetic construct
  REGION 1..11: note = synthetic
GSISSSDYPWG

SEQ ID NO: 206 - protein, 16 aa, synthetic construct
  REGION 1..16: note = synthetic
SIYYSGSTYYNPSLKS

SEQ ID NO: 207 - protein, 11 aa, synthetic construct
  REGION 1..11: note = synthetic
ARGPYRQVFDY

SEQ ID NO: 208 - protein, 445 aa, synthetic construct
  REGION 1..445: note = synthetic
QLQLQESGPGLVKPSETLSLTCTVSGGSISSSDYPWGWIRQPPGKGLEWIGSIYYSGSTYYNPSLKSRVTISVDTSKNQFSLKLSSVTAADTAVYYCARGPYRQVFDYWGQGTLVTVSSASTKGPSVFPLAPCSRSTSESTAALGCLVKDYFPEPVTVSWNSGALTSGVHTFPAVLQSSGLYSLSSVVTVPSSSLGTKTYTCNVDHKPSNTKVDKRVESKYGPPCPPCPAPEFLGGPSVFLFPPKPKDTLMISRTPEVTCVVVDVSQEDPEVQFNWYVDGVEVHNAKTKPREEQFNSTYRVVSVLTVLHQDWLNGKEYKCKVSNKGLPSSIEKTISKAKGQPREPQVYTLPPSQEEMTKNQVSLTCLVKGFYPSDIAVEWESNGQPENNYKTTPPVLDSDGSFFLYSRLTVDKSRWQEGNVFSCSVMHEALHNHYTQKSLSLSLG

SEQ ID NO: 209 - protein, 107 aa, synthetic construct
  REGION 1..107: note = synthetic
DIQMTQSPSSVSASVGDRVTITCRASQGISSWLAWYQQKPGKAPKLLIYAASSLQSGVPSRFSGSGSGTDFTLTISSLQPEDFATYYCQQGNSFPYTFGGGTKVEIK

SEQ ID NO: 210 - protein, 11 aa, synthetic construct
  REGION 1..11: note = synthetic
RASQGISSWLA

SEQ ID NO: 211 - protein, 7 aa, synthetic construct
  REGION 1..7: note = sythetic
AASSLQS

SEQ ID NO: 212 - protein, 9 aa, synthetic construct
  REGION 1..9: note = synthetic
QQGNSFPYT

SEQ ID NO: 213 - protein, 214 aa, synthetic construct
  REGION 1..214: note = synthetic
DIQMTQSPSSVSASVGDRVTITCRASQGISSWLAWYQQKPGKAPKLLIYAASSLQSGVPSRFSGSGSGTDFTLTISSLQPEDFATYYCQQGNSFPYTFGGGTKVEIKRTVAAPSVFIFPPSDEQLKSGTASVVCLLNNFYPREAKVQWKVDNALQSGNSQESVTEQDSKDSTYSLSSTLTLSKADYEKHKVYACEVTHQGLSSPVTKSFNRGEC

SEQ ID NO: 214 - protein, 119 aa, synthetic construct
  REGION 1..119: note = synthetic
QLQLQESSPGLVKPSETLSLTCTVSGGSISSPDYPWGWIRQPPGKGLEWIGSIFYSGNTYYNPSLKSRVTISVDTSKNQFSLKLSSVTAADTAVYYCARGPHRQVFDYWGQGTLVTVSS

SEQ ID NO: 215 - protein, 11 aa, synthetic construct
  REGION 1..11: note = synthetic
GSISSPDYPWG

SEQ ID NO: 216 - protein, 16 aa, synthetic construct
  REGION 1..16: note = synthetic
SIFYSGNTYYNPSLKS

SEQ ID NO: 217 - protein, 11 aa, synthetic construct
  REGION 1..11: note = synthetic
ARGPHRQVFDY

SEQ ID NO: 218 - protein, 445 aa, synthetic construct
  REGION 1..445: note = synthetic
QLQLQESSPGLVKPSETLSLTCTVSGGSISSPDYPWGWIRQPPGKGLEWIGSIFYSGNTYYNPSLKSRVTISVDTSKNQFSLKLSSVTAADTAVYYCARGPHRQVFDYWGQGTLVTVSSASTKGPSVFPLAPCSRSTSESTAALGCLVKDYFPEPVTVSWNSGALTSGVHTFPAVLQSSGLYSLSSVVTVPSSSLGTKTYTCNVDHKPSNTKVDKRVESKYGPPCPPCPAPEFLGGPSVFLFPPKPKDTLMISRTPEVTCVVVDVSQEDPEVQFNWYVDGVEVHNAKTKPREEQFNSTYRVVSVLTVLHQDWLNGKEYKCKVSNKGLPSSIEKTISKAKGQPREPQVYTLPPSQEEMTKNQVSLTCLVKGFYPSDIAVEWESNGQPENNYKTTPPVLDSDGSFFLYSRLTVDKSRWQEGNVFSCSVMHEALHNHYTQKSLSLSLG

SEQ ID NO: 219 - protein, 107 aa, synthetic construct
  REGION 1..107: note = synthetic
DIQMTQSPSSVSASVGDRVTITCRASQGISSWLAWYQQKPGKAPKLLIYAASSLQSGVPSRFSGSGSGTDFTLTISSLQPEDFATYYCQQGWSFPYTFGGGTKVEIK

SEQ ID NO: 220 - protein, 11 aa, synthetic construct
  REGION 1..11: note = synthetic
RASQGISSWLA

SEQ ID NO: 221 - protein, 7 aa, synthetic construct
  REGION 1..7: note = synthetic
AASSLQS

SEQ ID NO: 222 - protein, 9 aa, synthetic construct
  REGION 1..9: note = synthetic
QQGWSFPYT

SEQ ID NO: 223 - protein, 214 aa, synthetic construct
  REGION 1..214: note = synthetic
DIQMTQSPSSVSASVGDRVTITCRASQGISSWLAWYQQKPGKAPKLLIYAASSLQSGVPSRFSGSGSGTDFTLTISSLQPEDFATYYCQQGWSFPYTFGGGTKVEIKRTVAAPSVFIFPPSDEQLKSGTASVVCLLNNFYPREAKVQWKVDNALQSGNSQESVTEQDSKDSTYSLSSTLTLSKADYEKHKVYACEVTHQGLSSPVTKSFNRGEC

SEQ ID NO: 224 - protein, 119 aa, synthetic construct
  REGION 1..119: note = synthetic
QLQLQESGPGLVKPSETLSLTCTVSGGSISSSEYGWGWIRQPPGKGLEWIGSIVNSGSTYYNPSLKSRVTISVDTSKNQFSLKLSSVTAADTAVYYCARGPYRQVFDYWGQGTLVTVSS

SEQ ID NO: 225 - protein, 11 aa, synthetic construct
  REGION 1..11: note = synthetic
GSISSSEYGWG

SEQ ID NO: 226 - protein, 16 aa, synthetic construct
  REGION 1..16: note = synthetic
SIVNSGSTYYNPSLKS

SEQ ID NO: 227 - protein, 11 aa, synthetic construct
  REGION 1..11: note = synthetic
ARGPYRQVFDY

SEQ ID NO: 228 - protein, 445 aa, synthetic construct
  REGION 1..445: note = synthetic
QLQLQESGPGLVKPSETLSLTCTVSGGSISSSEYGWGWIRQPPGKGLEWIGSIVNSGSTYYNPSLKSRVTISVDTSKNQFSLKLSSVTAADTAVYYCARGPYRQVFDYWGQGTLVTVSSASTKGPSVFPLAPCSRSTSESTAALGCLVKDYFPEPVTVSWNSGALTSGVHTFPAVLQSSGLYSLSSVVTVPSSSLGTKTYTCNVDHKPSNTKVDKRVESKYGPPCPPCPAPEFLGGPSVFLFPPKPKDTLMISRTPEVTCVVVDVSQEDPEVQFNWYVDGVEVHNAKTKPREEQFNSTYRVVSVLTVLHQDWLNGKEYKCKVSNKGLPSSIEKTISKAKGQPREPQVYTLPPSQEEMTKNQVSLTCLVKGFYPSDIAVEWESNGQPENNYKTTPPVLDSDGSFFLYSRLTVDKSRWQEGNVFSCSVMHEALHNHYTQKSLSLSLG

SEQ ID NO: 229 - protein, 107 aa, synthetic construct; identical to SEQ ID NO: 219
  REGION 1..107: note = synthetic

SEQ ID NO: 230 - protein, 11 aa, synthetic construct
  REGION 1..11: note = synthetic
RASQGISSWLA

SEQ ID NO: 231 - protein, 7 aa, synthetic construct
  REGION 1..7: note = synthetic
AASSLQS

SEQ ID NO: 232 - protein, 9 aa, synthetic construct
  REGION 1..9: note = synthetic
QQGWSFPYT

SEQ ID NO: 233 - protein, 214 aa, synthetic construct; identical to SEQ ID NO: 223
  REGION 1..214: note = synthetic

SEQ ID NO: 234 - protein, 119 aa, synthetic construct
  REGION 1..119: note = synthetic
QLQLQESGPGLVKPSETLSLTCTVSGGSIFSSDYYWSWIRQPPGKGLEWIGVIAYSGSTYYNPSLKSRVTISVDTSKNQFSLKLSSATAADTAVYYCARGPFRQVFDYWGQGTLVTVSS

SEQ ID NO: 235 - protein, 11 aa, synthetic construct
  REGION 1..11: note = synthetic
GSIFSSDYYWS

SEQ ID NO: 236 - protein, 16 aa, synthetic construct
  REGION 1..16: note = synthetic
VIAYSGSTYYNPSLKS

SEQ ID NO: 237 - protein, 11 aa, synthetic construct
  REGION 1..11: note = synthetic
ARGPFRQVFDY

SEQ ID NO: 238 - protein, 445 aa, synthetic construct
  REGION 1..445: note = synthetic
QLQLQESGPGLVKPSETLSLTCTVSGGSIFSSDYYWSWIRQPPGKGLEWIGVIAYSGSTYYNPSLKSRVTISVDTSKNQFSLKLSSATAADTAVYYCARGPFRQVFDYWGQGTLVTVSSASTKGPSVFPLAPCSRSTSESTAALGCLVKDYFPEPVTVSWNSGALTSGVHTFPAVLQSSGLYSLSSVVTVPSSSLGTKTYTCNVDHKPSNTKVDKRVESKYGPPCPPCPAPEFLGGPSVFLFPPKPKDTLMISRTPEVTCVVVDVSQEDPEVQFNWYVDGVEVHNAKTKPREEQFNSTYRVVSVLTVLHQDWLNGKEYKCKVSNKGLPSSIEKTISKAKGQPREPQVYTLPPSQEEMTKNQVSLTCLVKGFYPSDIAVEWESNGQPENNYKTTPPVLDSDGSFFLYSRLTVDKSRWQEGNVFSCSVMHEALHNHYTQKSLSLSLG

SEQ ID NO: 239 - protein, 107 aa, synthetic construct; identical to SEQ ID NO: 189
  REGION 1..107: note = synthetic

SEQ ID NO: 240 - protein, 11 aa, synthetic construct
  REGION 1..11: note = synthetic
RASQGISSWLA

SEQ ID NO: 241 - protein, 7 aa, synthetic construct
  REGION 1..7: note = synthetic
AASSLQS

SEQ ID NO: 242 - protein, 9 aa, synthetic construct
  REGION 1..9: note = synthetic
QQGSSFPYT

SEQ ID NO: 243 - protein, 214 aa, synthetic construct; identical to SEQ ID NO: 193
  REGION 1..214: note = synthetic

SEQ ID NO: 244 - protein, 119 aa, synthetic construct
  REGION 1..119: note = synthetic
QLQLQESGPGLVKPSETLSLTCTVSGGSISSPDYPWGWIRQPPGKGLEWIGSIFYSGNTYYNPSLKSRVTISVDTSKNQFSLKLSSVTAADTAVYYCARGPFRQVFDYWGQGTLVTVSS

SEQ ID NO: 245 - protein, 11 aa, synthetic construct
  REGION 1..11: note = synthetic
GSISSPDYPWG

SEQ ID NO: 246 - protein, 16 aa, synthetic construct
  REGION 1..16: note = synthetic
SIFYSGNTYYNPSLKS

SEQ ID NO: 247 - protein, 11 aa, synthetic construct
  REGION 1..11: note = synthetic
ARGPFRQVFDY

SEQ ID NO: 248 - protein, 445 aa, synthetic construct
  REGION 1..445: note = synthetic
QLQLQESGPGLVKPSETLSLTCTVSGGSISSPDYPWGWIRQPPGKGLEWIGSIFYSGNTYYNPSLKSRVTISVDTSKNQFSLKLSSVTAADTAVYYCARGPFRQVFDYWGQGTLVTVSSASTKGPSVFPLAPCSRSTSESTAALGCLVKDYFPEPVTVSWNSGALTSGVHTFPAVLQSSGLYSLSSVVTVPSSSLGTKTYTCNVDHKPSNTKVDKRVESKYGPPCPPCPAPEFLGGPSVFLFPPKPKDTLMISRTPEVTCVVVDVSQEDPEVQFNWYVDGVEVHNAKTKPREEQFNSTYRVVSVLTVLHQDWLNGKEYKCKVSNKGLPSSIEKTISKAKGQPREPQVYTLPPSQEEMTKNQVSLTCLVKGFYPSDIAVEWESNGQPENNYKTTPPVLDSDGSFFLYSRLTVDKSRWQEGNVFSCSVMHEALHNHYTQKSLSLSLG

SEQ ID NO: 249 - protein, 107 aa, synthetic construct; identical to SEQ ID NO: 219
  REGION 1..107: note = synthetic

SEQ ID NO: 250 - protein, 11 aa, synthetic construct
  REGION 1..11: note = synthetic
RASQGISSWLA

SEQ ID NO: 251 - protein, 7 aa, synthetic construct
  REGION 1..7: note = synthetic
AASSLQS

SEQ ID NO: 252 - protein, 9 aa, synthetic construct
  REGION 1..9: note = synthetic
QQGWSFPYT

SEQ ID NO: 253 - protein, 214 aa, synthetic construct; identical to SEQ ID NO: 223
  REGION 1..214: note = synthetic

SEQ ID NO: 254 - protein, 194 aa, synthetic construct
  REGION 1..194: note = synthetic
MTMRHNWTPDLSPLWVLLLCAHVVTLLVRATPVSQTTTAATASVRSTKDPCPSQPPVFPAAKQCPALEVTWPEVEVPLNGTLSLSCVACSRFPNFSILYWLGNGSFIEHLPGRLWEGSTSRERGSTGTQLCKALVLEQLTPALHSTNFSCVLVDPEQVVQRHVVLAQLWAGLRATLPPTQEALPSSHSSPQQQG

SEQ ID NO: 255 - protein, 164 aa, synthetic construct
  REGION 1..164: note = synthetic
TPVSQTTTAATASVRSTKDPCPSQPPVFPAAKQCPALEVTWPEVEVPLNGTLSLSCVACSRFPNFSILYWLGNGSFIEHLPGRLWEGSTSRERGSTGTQLCKALVLEQLTPALHSTNFSCVLVDPEQVVQRHVVLAQLWAGLRATLPPTQEALPSSHSSPQQQG

SEQ ID NO: 256 - protein, 193 aa, synthetic construct
  REGION 1..193: note = synthetic
MTMRHCWTAGPSSWWVLLLYVHVILARATSAPQTTATVLTGSSKDPCSSWSPAVPTKQYPALDVIWPEKEVPLNGTLTLSCTACSRFPYFSILYWLGNGSFIEHLPGRLKEGHTSREHRNTSTWLHRALVLEELSPTLRSTNFSCLFVDPGQVAQYHIILAQLWDGLKTAPSPSQETLSSHSPVSRSAGPGVA

SEQ ID NO: 257 - protein, 165 aa, synthetic construct
  REGION 1..165: note = synthetic
TSAPQTTATVLTGSSKDPCSSWSPAVPTKQYPALDVIWPEKEVPLNGTLTLSCTACSRFPYFSILYWLGNGSFIEHLPGRLKEGHTSREHRNTSTWLHRALVLEELSPTLRSTNFSCLFVDPGQVAQYHIILAQLWDGLKTAPSPSQETLSSHSPVSRSAGPGVA

SEQ ID NO: 258 - protein, 193 aa, synthetic construct
  REGION 1..193: note = synthetic
MAAEPVEDNCINFVAMKFIDNTLYFIAEDDENLESDYFGKLESKLSVIRNLNDQVLFIDQGNRPLFEDMTDSDCRDNAPRTIFIISMYKDSQPRGMAVTISVKCEKISTLSCENKIISFKEMNPPDNIKDTKSDIIFFQRSVPGHDNKMQFESSSYEGYFLACEKERDLFKLILKKEDELGDRSIMFTVQNED

SEQ ID NO: 259 - protein, 192 aa, synthetic construct
  REGION 1..192: note = synthetic
MAAMSEDSCVNFKEMMFIDNTLYFIPEENGDLESDNFGRLHCTTAVIRNINDQVLFVDKRQPVFEDMTDIDQSASEPQTRLIIYMYKDSEVRGLAVTLSVKDSKMSTLSCKNKIISFEEMDPPENIDDIQSDLIFFQKRVPGHNKMEFESSLYEGHFLACQKEDDAFKLILKKKDENGDKSVMFTLTNLHQS

SEQ ID NO: 260 - protein, 120 aa, synthetic construct
  REGION 1..120: note = synthetic
QVQLVQSGAEVKKPGASVKVSCKASGYTFTDYNINWVRQAPGQGLEWMGYIYPYIGGSGYAQKFQGRVTMTRDTSTSTVYMELSSLRSEDTAVYYCAREDKTARNAMDYWGQGTLVTVSS

SEQ ID NO: 261 - protein, 8 aa, synthetic construct
  REGION 1..8: note = synthetic
GYTFTDYN

SEQ ID NO: 262 - protein, 8 aa, synthetic construct
  REGION 1..8: note = synthetic
IYPYIGGS

SEQ ID NO: 263 - protein, 13 aa, synthetic construct
  REGION 1..13: note = synthetic
AREDKTARNAMDY

SEQ ID NO: 264 - protein, 445 aa, synthetic construct
  REGION 1..445: note = synthetic
QVQLVQSGAEVKKPGASVKVSCKASGYTFTDYNINWVRQAPGQGLEWMGYIYPYIGGSGYAQKFQGRVTMTRDTSTSTVYMELSSLRSEDTAVYYCAREDKTARNAMDYWGQGTLVTVSSASTKGPSVFPLAPCSRSTSESTAALGCLVKDYFPEPVTVSWNSGALTSGVHTFPAVLQSSGLYSLSSVVTVPSSSLGTKTYTCNVDHKPSNTKVDKRVESKYGPPCPPCPAPEFLGGPSVFLFPPKPKDTLMISRTPEVTCVVVDVSQEDPEVQFNWYVDGVEVHNAKTKPREEQFNSTYRVVSVLTVLHQDWLNGKEYKCKVSNKGLPSSIEKTISKAKGQPREPQVYTLPPSQEEMTKNQVSLTCLVKGFYPSDIAVEWESNGQPENNYKTTPPVLDSDGSFFLYSRLTVDKSRWQEGNVFSCSVMHEALHNHYTQKSLSLSG

SEQ ID NO: 265 - protein, 107 aa, synthetic construct
  REGION 1..107: note = synthetic
DIQMTQSPSSLSASVGDRVTITCRVSENIYSNLAWYQQKPGKAPKLLIYEATNLAEGVPSRFSGSGSGTDFTLTISSLQPEDFATYYCQHFWGTPYTFGQGTKLEIK

SEQ ID NO: 266 - protein, 6 aa, synthetic construct
  REGION 1..6: note = synthetic
ENIYSN

SEQ ID NO: 267 - skipped

SEQ ID NO: 268 - protein, 9 aa, synthetic construct
  REGION 1..9: note = synthetic
QHFWGTPYT

SEQ ID NO: 269 - protein, 214 aa, synthetic construct
  REGION 1..214: note = synthetic
DIQMTQSPSSLSASVGDRVTITCRVSENIYSNLAWYQQKPGKAPKLLIYEATNLAEGVPSRFSGSGSGTDFTLTISSLQPEDFATYYCQHFWGTPYTFGQGTKLEIKRTVAAPSVFIFPPSDEQLKSGTASVVCLLNNFYPREAKVQWKVDNALQSGNSQESVTEQDSKDSTYSLSSTLTLSKADYEKHKVYACEVTHQGLSSPVTKSFNRGEC

SEQ ID NO: 270 - protein, 119 aa, synthetic construct
  REGION 1..119: note = synthetic
QVQLVQSGAEVKKPGASVKVSCKASGYAFTNYLIEWVRQAPGQGLEWIGVINPGSGGIYYAQKFQGRVTMTADTSTSTVYMELSSLRSEDTAVYYCARSETHDTWFAYWGQGTLVTVSS

SEQ ID NO: 271 - protein, 8 aa, synthetic construct
  REGION 1..8: note = synthetic
GYAFTNYL

SEQ ID NO: 272 - protein, 8 aa, synthetic construct
  REGION 1..8: note = synthetic
INPGSGGI

SEQ ID NO: 273 - protein, 12 aa, synthetic construct
  REGION 1..12: note = synthetic
ARSETHDTWFAY

SEQ ID NO: 274 - protein, 444 aa, synthetic construct
  REGION 1..444: note = synthetic
QVQLVQSGAEVKKPGASVKVSCKASGYAFTNYLIEWVRQAPGQGLEWIGVINPGSGGIYYAQKFQGRVTMTADTSTSTVYMELSSLRSEDTAVYYCARSETHDTWFAYWGQGTLVTVSSASTKGPSVFPLAPCSRSTSESTAALGCLVKDYFPEPVTVSWNSGALTSGVHTFPAVLQSSGLYSLSSVVTVPSSSLGTKTYTCNVDHKPSNTKVDKRVESKYGPPCPPCPAPEFLGGPSVFLFPPKPKDTLMISRTPEVTCVVVDVSQEDPEVQFNWYVDGVEVHNAKTKPREEQFNSTYRVVSVLTVLHQDWLNGKEYKCKVSNKGLPSSIEKTISKAKGQPREPQVYTLPPSQEEMTKNQVSLTCLVKGFYPSDIAVEWESNGQPENNYKTTPPVLDSDGSFFLYSRLTVDKSRWQEGNVFSCSVMHEALHNHYTQKSLSLSG

SEQ ID NO: 275 - protein, 107 aa, synthetic construct
  REGION 1..107: note = synthetic
DIQMTQSPSSLSASVGDRVTITCKASQSVRIAVAWFQQKPGKAPKALIYLASTRHTGVPSRFSGSGSGTDFTLTISSVQPEDFATYYCLQHWNYPYTFGQGTKLEIK

SEQ ID NO: 276 - protein, 6 aa, synthetic construct
  REGION 1..6: note = synthetic
QSVRIA

SEQ ID NO: 277 - skipped

SEQ ID NO: 278 - protein, 9 aa, synthetic construct
  REGION 1..9: note = synthetic
LQHWNYPYT

SEQ ID NO: 279 - protein, 214 aa, synthetic construct
  REGION 1..214: note = synthetic
DIQMTQSPSSLSASVGDRVTITCKASQSVRIAVAWFQQKPGKAPKALIYLASTRHTGVPSRFSGSGSGTDFTLTISSVQPEDFATYYCLQHWNYPYTFGQGTKLEIKRTVAAPSVFIFPPSDEQLKSGTASVVCLLNNFYPREAKVQWKVDNALQSGNSQESVTEQDSKDSTYSLSSTLTLSKADYEKHKVYACEVTHQGLSSPVTKSFNRGEC

SEQ ID NO: 280 - protein, 121 aa, synthetic construct
  REGION 1..121: note = synthetic
EVQLVETGGGLIQPGRSLRLSCAASGFTFSSYAMHWVRQAPGKGLEWVAVISYDGTPVYYADSVKGRFTISRDNSKNTLYLQMNSLRAEDTAVYYCARDPLPLHYYGMDVWGQGTTVTVSS

SEQ ID NO: 281 - protein, 8 aa, synthetic construct
  REGION 1..8: note = synthetic
GFTFSSYA

SEQ ID NO: 282 - protein, 8 aa, synthetic construct
  REGION 1..8: note = synthetic
ISYDGTPV

SEQ ID NO: 283 - protein, 14 aa, synthetic construct
  REGION 1..14: note = synthetic
ARDPLPLHYYGMDV

SEQ ID NO: 284 - protein, 446 aa, synthetic construct
  REGION 1..446: note = synthetic
EVQLVETGGGLIQPGRSLRLSCAASGFTFSSYAMHWVRQAPGKGLEWVAVISYDGTPVYYADSVKGRFTISRDNSKNTLYLQMNSLRAEDTAVYYCARDPLPLHYYGMDVWGQGTTVTVSSASTKGPSVFPLAPCSRSTSESTAALGCLVKDYFPEPVTVSWNSGALTSGVHTFPAVLQSSGLYSLSSVVTVPSSSLGTKTYTCNVDHKPSNTKVDKRVESKYGPPCPPCPAPEFLGGPSVFLFPPKPKDTLMISRTPEVTCVVVDVSQEDPEVQFNWYVDGVEVHNAKTKPREEQFNSTYRVVSVLTVLHQDWLNGKEYKCKVSNKGLPSSIEKTISKAKGQPREPQVYTLPPSQEEMTKNQVSLTCLVKGFYPSDIAVEWESNGQPENNYKTTPPVLDSDGSFFLYSRLTVDKSRWQEGNVFSCSVMHEALHNHYTQKSLSLSG

SEQ ID NO: 285 - protein, 111 aa, synthetic construct
  REGION 1..111: note = synthetic
QSALTQPRSASGNPGQRVTISCSGSSSNMGRRPVNWYQQIPGTAPKLLIYSQNQRPSGVPDRFSGSQSGTSASLTISGLQSEDEAEYFCAVWDGDRRSLQLGGGTQLAVLG

SEQ ID NO: 286 - protein, 8 aa, synthetic construct
  REGION 1..8: note = synthetic
SSNMGRRP

SEQ ID NO: 287 - skipped

SEQ ID NO: 288 - protein, 11 aa, synthetic construct
  REGION 1..11: note = synthetic
AVWDGDRRSLQ

SEQ ID NO: 289 - protein, 216 aa, synthetic construct
  REGION 1..216: note = synthetic
QSALTQPRSASGNPGQRVTISCSGSSSNMGRRPVNWYQQIPGTAPKLLIYSQNQRPSGVPDRFSGSQSGTSASLTISGLQSEDEAEYFCAVWDGDRRSLQLGGGTQLAVLGQPKAAPSVTLFPPSSEELQANKATLVCLISDFYPGAVTVAWKADSSPVKAGVETTTPSKQSNNKYAASSYLSLTPEQWKSHRSYSCQVTHEGSTVEKTVAPTECS

SEQ ID NO: 290 - protein, 121 aa, synthetic construct
  REGION 1..121: note = synthetic
EVQLVETGGGLIQPGRSLRLSCAASGFTFSSYAMHWVRQAPGKGLEWVAVISYAGEVKYYADSVKGRFTISRDNSKNTLYLQMNSLRAEDTAVYYCARDPLPLHYYGMDVWGQGTTVTVSS

SEQ ID NO: 291 - protein, 8 aa, synthetic construct
  REGION 1..8: note = synthetic
GFTFSSYA

SEQ ID NO: 292 - protein, 8 aa, synthetic construct
  REGION 1..8: note = synthetic
ISYAGEVK

SEQ ID NO: 293 - protein, 14 aa, synthetic construct
  REGION 1..14: note = synthetic
ARDPLPLHYYGMDV

SEQ ID NO: 294 - protein, 446 aa, synthetic construct
  REGION 1..446: note = synthetic
EVQLVETGGGLIQPGRSLRLSCAASGFTFSSYAMHWVRQAPGKGLEWVAVISYAGEVKYYADSVKGRFTISRDNSKNTLYLQMNSLRAEDTAVYYCARDPLPLHYYGMDVWGQGTTVTVSSASTKGPSVFPLAPCSRSTSESTAALGCLVKDYFPEPVTVSWNSGALTSGVHTFPAVLQSSGLYSLSSVVTVPSSSLGTKTYTCNVDHKPSNTKVDKRVESKYGPPCPPCPAPEFLGGPSVFLFPPKPKDTLMISRTPEVTCVVVDVSQEDPEVQFNWYVDGVEVHNAKTKPREEQFNSTYRVVSVLTVLHQDWLNGKEYKCKVSNKGLPSSIEKTISKAKGQPREPQVYTLPPSQEEMTKNQVSLTCLVKGFYPSDIAVEWESNGQPENNYKTTPPVLDSDGSFFLYSRLTVDKSRWQEGNVFSCSVMHEALHNHYTQKSLSLSG

SEQ ID NO: 295 - protein, 111 aa, synthetic construct
  REGION 1..111: note = synthetic
QSALTQPRSASGNPGQRVTISCSGSSSNMGRRPVNWYQQIPGTAPKLLIYSQNQRPSGVPDRFSGSQSGTSASLTISGLQSEDEAEYFCAVWDDIGRVLQLGGGTQLAVLG

SEQ ID NO: 296 - protein, 8 aa, synthetic construct
  REGION 1..8: note = synthetic
SSNMGRRP

SEQ ID NO: 297 - skipped

SEQ ID NO: 298 - protein, 11 aa, synthetic construct
  REGION 1..11: note = synthetic
AVWDDIGRVLQ

SEQ ID NO: 299 - protein, 216 aa, synthetic construct
  REGION 1..216: note = synthetic
QSALTQPRSASGNPGQRVTISCSGSSSNMGRRPVNWYQQIPGTAPKLLIYSQNQRPSGVPDRFSGSQSGTSASLTISGLQSEDEAEYFCAVWDDIGRVLQLGGGTQLAVLGQPKAAPSVTLFPPSSEELQANKATLVCLISDFYPGAVTVAWKADSSPVKAGVETTTPSKQSNNKYAASSYLSLTPEQWKSHRSYSCQVTHEGSTVEKTVAPTECS

SEQ ID NO: 300 - protein, 121 aa, synthetic construct
  REGION 1..121: note = synthetic
QVQLVESGGGLVQPGGSLRLSCAASGFTFSSYGMHWVRQAPGKGLEWVAFIRYDGSNKYYADSVKGRFTISRDNSKNTLYLQMNSLRAEDTAVYYCAKEMLVQDYYYMDVWGQGTTVTVSS

SEQ ID NO: 301 - protein, 8 aa, synthetic construct
  REGION 1..8: note = synthetic
GFTFSSYG

SEQ ID NO: 302 - protein, 8 aa, synthetic construct
  REGION 1..8: note = synthetic
IRYDGSNK

SEQ ID NO: 303 - protein, 14 aa, synthetic construct
  REGION 1..14: note = synthetic
AKEMLVQDYYYMDV

SEQ ID NO: 304 - protein, 448 aa, synthetic construct
  REGION 1..448: note = synthetic
QVQLVESGGGLVQPGGSLRLSCAASGFTFSSYGMHWVRQAPGKGLEWVAFIRYDGSNKYYADSVKGRFTISRDNSKNTLYLQMNSLRAEDTAVYYCAKEMLVQDYYYMDVWGQGTTVTVSSASTKGPSVFPLAPCSRSTSESTAALGCLVKDYFPEPVTVSWNSGALTSGVHTFPAVLQSSGLYSLSSVVTVPSSSLGTKTYTCNVDHKPSNTKVDKRVESKYGPPCPPCPAPEFLGGPSVFLFPPKPKDTLMISRTPEVTCVVVDVSQEDPEVQFNWYVDGVEVHNAKTKPREEQFNSTYRVVSVLTVLHQDWLNGKEYKCKVSNKGLPSSIEKTISKAKGQPREPQVYTLPPSQEEMTKNQVSLTCLVKGFYPSDIAVEWESNGQPENNYKTTPPVLDSDGSFFLYSRLTVDKSRWQEGNVFSCSVMHEALHNHYTQKSLSLSPGK

SEQ ID NO: 305 - protein, 113 aa, synthetic construct
  REGION 1..113: note = synthetic
DVVMTQSPLSLPVSPGEPASISCRSSQNLLHRNGINYLNWYLQKPGQSPQLLIYWGSNRASGVPDRFSGSGSGTDFTLKISRVEAEDVGVYYCMQGLQIPPTFGQGTKVDIKR

SEQ ID NO: 306 - protein, 11 aa, synthetic construct
  REGION 1..11: note = synthetic
QNLLHRNGINY

SEQ ID NO: 307 - skipped

SEQ ID NO: 308 - protein, 9 aa, synthetic construct
  REGION 1..9: note = synthetic
MQGLQIPPT

SEQ ID NO: 309 - protein, 219 aa, synthetic construct
  REGION 1..219: note = synthetic
DVVMTQSPLSLPVSPGEPASISCRSSQNLLHRNGINYLNWYLQKPGQSPQLLIYWGSNRASGVPDRFSGSGSGTDFTLKISRVEAEDVGVYYCMQGLQIPPTFGQGTKVDIKRTVAAPSVFIFPPSDEQLKSGTASVVCLLNNFYPREAKVQWKVDNALQSGNSQESVTEQDSKDSTYSLSSTLTLSKADYEKHKVYACEVTHQGLSSPVTKSFNRGEC

SEQ ID NO: 310 - protein, 121 aa, synthetic construct
  REGION 1..121: note = synthetic
EVQLVETGGGLIQPGRSLRLSCAASGFTFSSYAMHWVRQAPGKGLEWVAVISYDGSNKYYADSVKGRFTISRDNSKNTLYLQMNSLRAEDTAVYYCARDPLPLHYYGMDVWGQGTTVTVSS

SEQ ID NO: 311 - protein, 8 aa, synthetic construct
  REGION 1..8: note = synthetic
GFTFSSYA

SEQ ID NO: 312 - protein, 8 aa, synthetic construct
  REGION 1..8: note = synthetic
ISYDGSNK

SEQ ID NO: 313 - protein, 14 aa, synthetic construct
  REGION 1..14: note = synthetic
ARDPLPLHYYGMDV

SEQ ID NO: 314 - protein, 448 aa, synthetic construct
  REGION 1..448: note = synthetic
EVQLVETGGGLIQPGRSLRLSCAASGFTFSSYAMHWVRQAPGKGLEWVAVISYDGSNKYYADSVKGRFTISRDNSKNTLYLQMNSLRAEDTAVYYCARDPLPLHYYGMDVWGQGTTVTVSSASTKGPSVFPLAPCSRSTSESTAALGCLVKDYFPEPVTVSWNSGALTSGVHTFPAVLQSSGLYSLSSVVTVPSSSLGTKTYTCNVDHKPSNTKVDKRVESKYGPPCPPCPAPEFLGGPSVFLFPPKPKDTLMISRTPEVTCVVVDVSQEDPEVQFNWYVDGVEVHNAKTKPREEQFNSTYRVVSVLTVLHQDWLNGKEYKCKVSNKGLPSSIEKTISKAKGQPREPQVYTLPPSQEEMTKNQVSLTCLVKGFYPSDIAVEWESNGQPENNYKTTPPVLDSDGSFFLYSRLTVDKSRWQEGNVFSCSVMHEALHNHYTQKSLSLSPGK

SEQ ID NO: 315 - protein, 111 aa, synthetic construct
  REGION 1..111: note = synthetic
QSALTQPRSASGNPGQRVTISCSGSSSNMGRRPVNWYQQIPGTAPKLLIYSQNQRPSGVPDRFSGSQSGTSASLTISGLQSEDEAEYFCAVWDDSLSSLQLGGGTQLAVLG

SEQ ID NO: 316 - protein, 8 aa, synthetic construct
  REGION 1..8: note = synthetic
SSNMGRRP

SEQ ID NO: 317 - skipped

SEQ ID NO: 318 - protein, 11 aa, synthetic construct
  REGION 1..11: note = synthetic
AVWDDSLSSLQ

SEQ ID NO: 319 - protein, 216 aa, synthetic construct
  REGION 1..216: note = synthetic
QSALTQPRSASGNPGQRVTISCSGSSSNMGRRPVNWYQQIPGTAPKLLIYSQNQRPSGVPDRFSGSQSGTSASLTISGLQSEDEAEYFCAVWDDSLSSLQLGGGTQLAVLGQPKAAPSVTLFPPSSEELQANKATLVCLISDFYPGAVTVAWKADSSPVKAGVETTTPSKQSNNKYAASSYLSLTPEQWKSHRSYSCQVTHEGSTVEKTVAPTECS

SEQ ID NO: 320 - protein, 121 aa, synthetic construct; identical to SEQ ID NO: 310
  REGION 1..121: note = synthetic

SEQ ID NO: 321 - protein, 8 aa, synthetic construct
  REGION 1..8: note = synthetic
GFTFSSYA

SEQ ID NO: 322 - protein, 8 aa, synthetic construct
  REGION 1..8: note = synthetic
ISYDGSNK

SEQ ID NO: 323 - protein, 14 aa, synthetic construct
  REGION 1..14: note = synthetic
ARDPLPLHYYGMDV

SEQ ID NO: 324 - protein, 448 aa, synthetic construct; identical to SEQ ID NO: 314
  REGION 1..448: note = synthetic

SEQ ID NO: 325 - protein, 111 aa, synthetic construct
  REGION 1..111: note = synthetic
QSALTQPRSASGNPGQRVTISCSGSSSNMGRRPVNWYQQIPGTAPKLLIYSQNQRPSGVPDRFSGSQSGTSASLTISGLQSEDEAEYFCAVWDDSLFSLLLGGGTQLAVLG

SEQ ID NO: 326 - protein, 8 aa, synthetic construct
  REGION 1..8: note = synthetic
SSNMGRRP

SEQ ID NO: 327 - skipped

SEQ ID NO: 328 - protein, 11 aa, synthetic construct
  REGION 1..11: note = synthetic
AVWDDSLFSLL

SEQ ID NO: 329 - protein, 216 aa, synthetic construct
  REGION 1..216: note = synthetic
QSALTQPRSASGNPGQRVTISCSGSSSNMGRRPVNWYQQIPGTAPKLLIYSQNQRPSGVPDRFSGSQSGTSASLTISGLQSEDEAEYFCAVWDDSLFSLLLGGGTQLAVLGQPKAAPSVTLFPPSSEELQANKATLVCLISDFYPGAVTVAWKADSSPVKAGVETTTPSKQSNNKYAASSYLSLTPEQWKSHRSYSCQVTHEGSTVEKTVAPTECS

SEQ ID NO: 330 - protein, 121 aa, synthetic construct
  REGION 1..121: note = synthetic
QVQLQESGPGLVKPSETLSLTCTVSGGSISSSSYYWGWIRQPPGKGLEWIGSIYYSGSTYYNPSLKSRVTISVDTSKNQFSLKLSSVTAADTAVYYCARQGAAAGNPFDIWGQGTMVTVSS

SEQ ID NO: 331 - protein, 10 aa, synthetic construct
  REGION 1..10: note = synthetic
GGSISSSSYY

SEQ ID NO: 332 - protein, 7 aa, synthetic construct
  REGION 1..7: note = synthetic
IYYSGST

SEQ ID NO: 333 - protein, 13 aa, synthetic construct
  REGION 1..13: note = synthetic
ARQGAAAGNPFDI

SEQ ID NO: 334 - protein, 448 aa, synthetic construct
  REGION 1..448: note = synthetic
QVQLQESGPGLVKPSETLSLTCTVSGGSISSSSYYWGWIRQPPGKGLEWIGSIYYSGSTYYNPSLKSRVTISVDTSKNQFSLKLSSVTAADTAVYYCARQGAAAGNPFDIWGQGTMVTVSSASTKGPSVFPLAPCSRSTSESTAALGCLVKDYFPEPVTVSWNSGALTSGVHTFPAVLQSSGLYSLSSVVTVPSSSLGTKTYTCNVDHKPSNTKVDKRVESKYGPPCPPCPAPEFLGGPSVFLFPPKPKDTLMISRTPEVTCVVVDVSQEDPEVQFNWYVDGVEVHNAKTKPREEQFNSTYRVVSVLTVLHQDWLNGKEYKCKVSNKGLPSSIEKTISKAKGQPREPQVYTLPPSQEEMTKNQVSLTCLVKGFYPSDIAVEWESNGQPENNYKTTPPVLDSDGSFFLYSRLTVDKSRWQEGNVFSCSVMHEALHNHYTQKSLSLSPGK

SEQ ID NO: 335 - protein, 111 aa, synthetic construct
  REGION 1..111: note = synthetic
QSVLTQPPSVSGTPGQRVTISCSGSSSNIGSNFVYWHQQLTGTAPKLLIYRNTQRPSGVPDRFSGSKSGTSASLAIGGLRSEDEADYYCATWDDSLSAWVFGGGTKLTVLG

SEQ ID NO: 336 - protein, 8 aa, synthetic construct
  REGION 1..8: note = synthetic
SSNIGSNF

SEQ ID NO: 337 - skipped

SEQ ID NO: 338 - protein, 11 aa, synthetic construct
  REGION 1..11: note = synthetic
ATWDDSLSAWV

SEQ ID NO: 339 - protein, 216 aa, synthetic construct
  REGION 1..216: note = synthetic
QSVLTQPPSVSGTPGQRVTISCSGSSSNIGSNFVYWHQQLTGTAPKLLIYRNTQRPSGVPDRFSGSKSGTSASLAIGGLRSEDEADYYCATWDDSLSAWVFGGGTKLTVLGQPKAAPSVTLFPPSSEELQANKATLVCLISDFYPGAVTVAWKADSSPVKAGVETTTPSKQSNNKYAASSYLSLTPEQWKSHRSYSCQVTHEGSTVEKTVAPTECS

SEQ ID NO: 340 - protein, 119 aa, synthetic construct
  REGION 1..119: note = synthetic
EVQLVETGGGLIQPGGSLRLSCAASGFTVSSNYMSWVRQAPGKGLEWVSVIYSGGSTYYADSVKGRFTISRDNSKNTLYLQMNSLRAEDTAVYYCARGARYSYGQYPYWGQGTLVTVSS

SEQ ID NO: 341 - protein, 8 aa, synthetic construct
  REGION 1..8: note = synthetic
GFTVSSNY

SEQ ID NO: 342 - protein, 7 aa, synthetic construct
  REGION 1..7: note = synthetic
IYSGGST

SEQ ID NO: 343 - protein, 13 aa, synthetic construct
  REGION 1..13: note = synthetic
ARGARYSYGQYPY

SEQ ID NO: 344 - protein, 446 aa, synthetic construct
  REGION 1..446: note = synthetic
EVQLVETGGGLIQPGGSLRLSCAASGFTVSSNYMSWVRQAPGKGLEWVSVIYSGGSTYYADSVKGRFTISRDNSKNTLYLQMNSLRAEDTAVYYCARGARYSYGQYPYWGQGTLVTVSSASTKGPSVFPLAPCSRSTSESTAALGCLVKDYFPEPVTVSWNSGALTSGVHTFPAVLQSSGLYSLSSVVTVPSSSLGTKTYTCNVDHKPSNTKVDKRVESKYGPPCPPCPAPEFLGGPSVFLFPPKPKDTLMISRTPEVTCVVVDVSQEDPEVQFNWYVDGVEVHNAKTKPREEQFNSTYRVVSVLTVLHQDWLNGKEYKCKVSNKGLPSSIEKTISKAKGQPREPQVYTLPPSQEEMTKNQVSLTCLVKGFYPSDIAVEWESNGQPENNYKTTPPVLDSDGSFFLYSRLTVDKSRWQEGNVFSCSVMHEALHNHYTQKSLSLSPGK

SEQ ID NO: 345 - protein, 109 aa, synthetic construct
  REGION 1..109: note = synthetic
DIQLTQSPSFLSASVGDRVTITCRASHDISSLFSWYQQKPGKAPKLLIYAASTLQTGVPSRFSGSASGTEFTLTISSLQPEDFATYYCLQLDSFPTWTFGQGTKVEIKR

SEQ ID NO: 346 - protein, 6 aa, synthetic construct
  REGION 1..6: note = synthetic
HDISSL

SEQ ID NO: 347 - skipped

SEQ ID NO: 348 - protein, 10 aa, synthetic construct
  REGION 1..10: note = synthetic
LQLDSFPTWT

SEQ ID NO: 349 - protein, 215 aa, synthetic construct
  REGION 1..215: note = synthetic
DIQLTQSPSFLSASVGDRVTITCRASHDISSLFSWYQQKPGKAPKLLIYAASTLQTGVPSRFSGSASGTEFTLTISSLQPEDFATYYCLQLDSFPTWTFGQGTKVEIKRTVAAPSVFIFPPSDEQLKSGTASVVCLLNNFYPREAKVQWKVDNALQSGNSQESVTEQDSKDSTYSLSSTLTLSKADYEKHKVYACEVTHQGLSSPVTKSFNRGEC

SEQ ID NO: 350 - protein, 121 aa, synthetic construct; identical to SEQ ID NO: 280
  REGION 1..121: note = synthetic

SEQ ID NO: 351 - protein, 8 aa, synthetic construct
  REGION 1..8: note = synthetic
GFTFSSYA

SEQ ID NO: 352 - protein, 8 aa, synthetic construct
  REGION 1..8: note = synthetic
ISYDGTPV

SEQ ID NO: 353 - protein, 14 aa, synthetic construct
  REGION 1..14: note = synthetic
ARDPLPLHYYGMDV

SEQ ID NO: 354 - protein, 448 aa, synthetic construct
  REGION 1..448: note = synthetic
EVQLVETGGGLIQPGRSLRLSCAASGFTFSSYAMHWVRQAPGKGLEWVAVISYDGTPVYYADSVKGRFTISRDNSKNTLYLQMNSLRAEDTAVYYCARDPLPLHYYGMDVWGQGTTVTVSSASTKGPSVFPLAPCSRSTSESTAALGCLVKDYFPEPVTVSWNSGALTSGVHTFPAVLQSSGLYSLSSVVTVPSSSLGTKTYTCNVDHKPSNTKVDKRVESKYGPPCPPCPAPEFLGGPSVFLFPPKPKDTLMISRTPEVTCVVVDVSQEDPEVQFNWYVDGVEVHNAKTKPREEQFNSTYRVVSVLTVLHQDWLNGKEYKCKVSNKGLPSSIEKTISKAKGQPREPQVYTLPPSQEEMTKNQVSLTCLVKGFYPSDIAVEWESNGQPENNYKTTPPVLDSDGSFFLYSRLTVDKSRWQEGNVFSCSVMHEALHNHYTQKSLSLSPGK

SEQ ID NO: 355 - protein, 111 aa, synthetic construct; identical to SEQ ID NO: 285
  REGION 1..111: note = synthetic

SEQ ID NO: 356 - protein, 8 aa, synthetic construct
  REGION 1..8: note = sythetic
SSNMGRRP

SEQ ID NO: 357 - skipped

SEQ ID NO: 358 - protein, 11 aa, synthetic construct
  REGION 1..11: note = synthetic
AVWDGDRRSLQ

SEQ ID NO: 359 - protein, 216 aa, synthetic construct; identical to SEQ ID NO: 289
  REGION 1..216: note = synthetic

SEQ ID NO: 360 - protein, 121 aa, synthetic construct; identical to SEQ ID NO: 290
  REGION 1..121: note = synthetic

SEQ ID NO: 361 - protein, 8 aa, synthetic construct
  REGION 1..8: note = synthetic
GFTFSSYA

SEQ ID NO: 362 - protein, 8 aa, synthetic construct
  REGION 1..8: note = synthetic
ISYAGEVK

SEQ ID NO: 363 - protein, 14 aa, synthetic construct
  REGION 1..14: note = synthetic
ARDPLPLHYYGMDV

SEQ ID NO: 364 - protein, 448 aa, synthetic construct
  REGION 1..448: note = synthetic
EVQLVETGGGLIQPGRSLRLSCAASGFTFSSYAMHWVRQAPGKGLEWVAVISYAGEVKYYADSVKGRFTISRDNSKNTLYLQMNSLRAEDTAVYYCARDPLPLHYYGMDVWGQGTTVTVSSASTKGPSVFPLAPCSRSTSESTAALGCLVKDYFPEPVTVSWNSGALTSGVHTFPAVLQSSGLYSLSSVVTVPSSSLGTKTYTCNVDHKPSNTKVDKRVESKYGPPCPPCPAPEFLGGPSVFLFPPKPKDTLMISRTPEVTCVVVDVSQEDPEVQFNWYVDGVEVHNAKTKPREEQFNSTYRVVSVLTVLHQDWLNGKEYKCKVSNKGLPSSIEKTISKAKGQPREPQVYTLPPSQEEMTKNQVSLTCLVKGFYPSDIAVEWESNGQPENNYKTTPPVLDSDGSFFLYSRLTVDKSRWQEGNVFSCSVMHEALHNHYTQKSLSLSPGK

SEQ ID NO: 365 - protein, 111 aa, synthetic construct; identical to SEQ ID NO: 295
  REGION 1..111: note = synthetic

SEQ ID NO: 366 - protein, 8 aa, synthetic construct
  REGION 1..8: note = synthetic
SSNMGRRP

SEQ ID NO: 367 - skipped

SEQ ID NO: 368 - protein, 11 aa, synthetic construct
  REGION 1..11: note = synthetic
AVWDDIGRVLQ

SEQ ID NO: 369 - protein, 216 aa, synthetic construct; identical to SEQ ID NO: 299
  REGION 1..216: note = synthetic

SEQ ID NO: 370 - protein, 121 aa, synthetic construct
  REGION 1..121: note = synthetic
EVQLVETGGGLIQPGRSLRLSCAASGFTFSSYAMHWVRQAPGKGLEWVAVISYDRTPVYYADSVKGRFTISRDNSKNTLYLQMNSLRAEDTAVYYCARDPLPLHYYGMDVWGQGTTVTVSS

SEQ ID NO: 371 - protein, 8 aa, synthetic construct
  REGION 1..8: note = synthetic
GFTFSSYA

SEQ ID NO: 372 - protein, 8 aa, synthetic construct
  REGION 1..8: note = synthetic
ISYDRTPV

SEQ ID NO: 373 - protein, 8 aa, synthetic construct
  REGION 1..8: note = synthetic
ISYDRTPV

SEQ ID NO: 374 - protein, 448 aa, synthetic construct
  REGION 1..448: note = synthetic
EVQLVETGGGLIQPGRSLRLSCAASGFTFSSYAMHWVRQAPGKGLEWVAVISYDRTPVYYADSVKGRFTISRDNSKNTLYLQMNSLRAEDTAVYYCARDPLPLHYYGMDVWGQGTTVTVSSASTKGPSVFPLAPCSRSTSESTAALGCLVKDYFPEPVTVSWNSGALTSGVHTFPAVLQSSGLYSLSSVVTVPSSSLGTKTYTCNVDHKPSNTKVDKRVESKYGPPCPPCPAPEFLGGPSVFLFPPKPKDTLMISRTPEVTCVVVDVSQEDPEVQFNWYVDGVEVHNAKTKPREEQFNSTYRVVSVLTVLHQDWLNGKEYKCKVSNKGLPSSIEKTISKAKGQPREPQVYTLPPSQEEMTKNQVSLTCLVKGFYPSDIAVEWESNGQPENNYKTTPPVLDSDGSFFLYSRLTVDKSRWQEGNVFSCSVMHEALHNHYTQKSLSLSPGK

SEQ ID NO: 375 - protein, 111 aa, synthetic construct
  REGION 1..111: note = synthetic
QSALTQPRSASGNPGQRVTISCSGSSSNMGRRPVNWYQQIPGTAPKLLIYSQNQRPSGVPDRFSGSQSGTSASLTISGLQSEDEAEYFCATWDDSLPRLNFGGGTKLAVLG

SEQ ID NO: 376 - protein, 8 aa, synthetic construct
  REGION 1..8: note = synthetic
SSNMGRRP

SEQ ID NO: 377 - skipped

SEQ ID NO: 378 - protein, 11 aa, synthetic construct
  REGION 1..11: note = synthetic
ATWDDSLPRLN

SEQ ID NO: 379 - protein, 216 aa, synthetic construct
  REGION 1..216: note = synthetic
QSALTQPRSASGNPGQRVTISCSGSSSNMGRRPVNWYQQIPGTAPKLLIYSQNQRPSGVPDRFSGSQSGTSASLTISGLQSEDEAEYFCATWDDSLPRLNFGGGTKLAVLGQPKAAPSVTLFPPSSEELQANKATLVCLISDFYPGAVTVAWKADSSPVKAGVETTTPSKQSNNKYAASSYLSLTPEQWKSHRSYSCQVTHEGSTVEKTVAPTECS

SEQ ID NO: 380 - protein, 121 aa, synthetic construct
  REGION 1..121: note = synthetic
EVQLVETGGGLIQPGRSLRLSCAASGFTFSSYAMHWVRQAPGKGLEWVAVISYEGDRKYYADSVKGRFTISRDNSKNTLYLQMNSLRAEDTAVYYCARDPLPLHYYGMDVWGQGTTVTVSS

SEQ ID NO: 381 - protein, 8 aa, synthetic construct
  REGION 1..8: note = synthetic
GFTFSSYA

SEQ ID NO: 382 - protein, 8 aa, synthetic construct
  REGION 1..8: note = synthetic
ISYEGDRK

SEQ ID NO: 383 - protein, 14 aa, synthetic construct
  REGION 1..14: note = synthetic
ARDPLPLHYYGMDV

SEQ ID NO: 384 - protein, 448 aa, synthetic construct
  REGION 1..448: note = synthetic
EVQLVETGGGLIQPGRSLRLSCAASGFTFSSYAMHWVRQAPGKGLEWVAVISYEGDRKYYADSVKGRFTISRDNSKNTLYLQMNSLRAEDTAVYYCARDPLPLHYYGMDVWGQGTTVTVSSASTKGPSVFPLAPCSRSTSESTAALGCLVKDYFPEPVTVSWNSGALTSGVHTFPAVLQSSGLYSLSSVVTVPSSSLGTKTYTCNVDHKPSNTKVDKRVESKYGPPCPPCPAPEFLGGPSVFLFPPKPKDTLMISRTPEVTCVVVDVSQEDPEVQFNWYVDGVEVHNAKTKPREEQFNSTYRVVSVLTVLHQDWLNGKEYKCKVSNKGLPSSIEKTISKAKGQPREPQVYTLPPSQEEMTKNQVSLTCLVKGFYPSDIAVEWESNGQPENNYKTTPPVLDSDGSFFLYSRLTVDKSRWQEGNVFSCSVMHEALHNHYTQKSLSLSPGK

SEQ ID NO: 385 - protein, 111 aa, synthetic construct
  REGION 1..111: note = synthetic
QSALTQPRSASGNPGQRVTISCSGSSSNMGRRPVNWYQQIPGTAPKLLIYSQNQRPSGVPDRFSGSQSGTSASLTISGLQSEDEAEYFCATWDDSTPHGVFGGGTKLAVLG

SEQ ID NO: 386 - protein, 8 aa, synthetic construct
  REGION 1..8: note = synthetic
SSNMGRRP

SEQ ID NO: 387 - skipped

SEQ ID NO: 388 - protein, 11 aa, synthetic construct
  REGION 1..11: note = synthetic
ATWDDSTPHGV

SEQ ID NO: 389 - protein, 216 aa, synthetic construct
  REGION 1..216: note = synthetic
QSALTQPRSASGNPGQRVTISCSGSSSNMGRRPVNWYQQIPGTAPKLLIYSQNQRPSGVPDRFSGSQSGTSASLTISGLQSEDEAEYFCATWDDSTPHGVFGGGTKLAVLGQPKAAPSVTLFPPSSEELQANKATLVCLISDFYPGAVTVAWKADSSPVKAGVETTTPSKQSNNKYAASSYLSLTPEQWKSHRSYSCQVTHEGSTVEKTVAPTECS

SEQ ID NO: 390 - protein, 118 aa, synthetic construct
  REGION 1..118: note = synthetic
EVQLVETGGGLIQPGGSLRLSCAASGFTVSSNYMSWVRQAPGKGLEWVSVIYSGGSTYYADSVKGRFTISRDNSKNTLYLQMNSLRAEDTAVYYCARGAPLFGQYPYWGQGTLVTVSS

SEQ ID NO: 391 - protein, 8 aa, synthetic construct
  REGION 1..8: note = synthetic
GFTVSSNY

SEQ ID NO: 392 - protein, 7 aa, synthetic construct
  REGION 1..7: note = synthetic
IYSGGST

SEQ ID NO: 393 - protein, 12 aa, synthetic construct
  REGION 1..12: note = synthetic
ARGAPLFGQYPY

SEQ ID NO: 394 - protein, 445 aa, synthetic construct
  REGION 1..445: note = synthetic
EVQLVETGGGLIQPGGSLRLSCAASGFTVSSNYMSWVRQAPGKGLEWVSVIYSGGSTYYADSVKGRFTISRDNSKNTLYLQMNSLRAEDTAVYYCARGAPLFGQYPYWGQGTLVTVSSASTKGPSVFPLAPCSRSTSESTAALGCLVKDYFPEPVTVSWNSGALTSGVHTFPAVLQSSGLYSLSSVVTVPSSSLGTKTYTCNVDHKPSNTKVDKRVESKYGPPCPPCPAPEFLGGPSVFLFPPKPKDTLMISRTPEVTCVVVDVSQEDPEVQFNWYVDGVEVHNAKTKPREEQFNSTYRVVSVLTVLHQDWLNGKEYKCKVSNKGLPSSIEKTISKAKGQPREPQVYTLPPSQEEMTKNQVSLTCLVKGFYPSDIAVEWESNGQPENNYKTTPPVLDSDGSFFLYSRLTVDKSRWQEGNVFSCSVMHEALHNHYTQKSLSLSPGK

SEQ ID NO: 395 - protein, 109 aa, synthetic construct
  REGION 1..109: note = synthetic
DIQMTQSPSSLSASVGDRVTITCRASHAIASLFSWYQQKPGKAPKLLIYAASTLQTGVPSRFSGSASGTEFTLTISSLQPEDFATYYCLQLDSFPTWTFGQGTKVEIKR

SEQ ID NO: 396 - protein, 6 aa, synthetic construct
  REGION 1..6: note = synthetic
HAIASL

SEQ ID NO: 397 - skipped

SEQ ID NO: 398 - protein, 10 aa, synthetic construct
  REGION 1..10: note = synthetic
LQLDSFPTWT

SEQ ID NO: 399 - protein, 215 aa, synthetic construct
  REGION 1..215: note = synthetic
DIQMTQSPSSLSASVGDRVTITCRASHAIASLFSWYQQKPGKAPKLLIYAASTLQTGVPSRFSGSASGTEFTLTISSLQPEDFATYYCLQLDSFPTWTFGQGTKVEIKRTVAAPSVFIFPPSDEQLKSGTASVVCLLNNFYPREAKVQWKVDNALQSGNSQESVTEQDSKDSTYSLSSTLTLSKADYEKHKVYACEVTHQGLSSPVTKSFNRGEC

SEQ ID NO: 400 - protein, 118 aa, synthetic construct
  REGION 1..118: note = synthetic
EVQLVETGGGLIQPGGSLRLSCAASGFTVSSNYMSWVRQAPGKGLEWVSVIYSGGSTYYADSVKGRFTISRDNSKNTLYLQMNSLRAEDTAVYYCARGARPNGQYPYWGQGTLVTVSS

SEQ ID NO: 401 - protein, 8 aa, synthetic construct
  REGION 1..8: note = synthetic
GFTVSSNY

SEQ ID NO: 402 - protein, 7 aa, synthetic construct
  REGION 1..7: note = synthetic
IYSGGST

SEQ ID NO: 403 - protein, 12 aa, synthetic construct
  REGION 1..12: note = synthetic
ARGARPNGQYPY

SEQ ID NO: 404 - protein, 445 aa, synthetic construct
  REGION 1..445: note = synthetic
EVQLVETGGGLIQPGGSLRLSCAASGFTVSSNYMSWVRQAPGKGLEWVSVIYSGGSTYYADSVKGRFTISRDNSKNTLYLQMNSLRAEDTAVYYCARGARPNGQYPYWGQGTLVTVSSASTKGPSVFPLAPCSRSTSESTAALGCLVKDYFPEPVTVSWNSGALTSGVHTFPAVLQSSGLYSLSSVVTVPSSSLGTKTYTCNVDHKPSNTKVDKRVESKYGPPCPPCPAPEFLGGPSVFLFPPKPKDTLMISRTPEVTCVVVDVSQEDPEVQFNWYVDGVEVHNAKTKPREEQFNSTYRVVSVLTVLHQDWLNGKEYKCKVSNKGLPSSIEKTISKAKGQPREPQVYTLPPSQEEMTKNQVSLTCLVKGFYPSDIAVEWESNGQPENNYKTTPPVLDSDGSFFLYSRLTVDKSRWQEGNVFSCSVMHEALHNHYTQKSLSLSPGK

SEQ ID NO: 405 - protein, 109 aa, synthetic construct
  REGION 1..109: note = synthetic
DIQLTQSPSFLSASVGDRVTITCRASHGIKSLFSWYQQKPGKAPKLLIYAASTLQTGVPSRFSGSASGTEFTLTISSLQPEDFATYYCLQLDSFPTWTFGQGTKVEIKR

SEQ ID NO: 406 - protein, 6 aa, synthetic construct
  REGION 1..6: note = synthetic
HGIKSL

SEQ ID NO: 407 - skipped

SEQ ID NO: 408 - protein, 10 aa, synthetic construct
  REGION 1..10: note = synthetic
LQLDSFPTWT

SEQ ID NO: 409 - protein, 215 aa, synthetic construct
  REGION 1..215: note = synthetic
DIQLTQSPSFLSASVGDRVTITCRASHGIKSLFSWYQQKPGKAPKLLIYAASTLQTGVPSRFSGSASGTEFTLTISSLQPEDFATYYCLQLDSFPTWTFGQGTKVEIKRTVAAPSVFIFPPSDEQLKSGTASVVCLLNNFYPREAKVQWKVDNALQSGNSQESVTEQDSKDSTYSLSSTLTLSKADYEKHKVYACEVTHQGLSSPVTKSFNRGEC

SEQ ID NO: 410 - protein, 119 aa, synthetic construct
  REGION 1..119: note = synthetic
EVQLQQSGPELVKPGSSVKMSCKASGYTFSSYVMHWVKQKPGQGLEWIGYIDPYNDGAKYNEKFKGKATLTSDKSSSTAYMELSSLTSEDSAVYYCARGGPYGWYFDVWGAGTTVTVSS

SEQ ID NO: 411 - protein, 8 aa, synthetic construct
  REGION 1..8: note = synthetic
GYTFSSYV

SEQ ID NO: 412 - protein, 8 aa, synthetic construct
  REGION 1..8: note = synthetic
IDPYNDGA

SEQ ID NO: 413 - protein, 12 aa, synthetic construct
  REGION 1..12: note = synthetic
ARGGPYGWYFDV

SEQ ID NO: 414 - protein, 446 aa, synthetic construct
  REGION 1..446: note = synthetic
EVQLQQSGPELVKPGSSVKMSCKASGYTFSSYVMHWVKQKPGQGLEWIGYIDPYNDGAKYNEKFKGKATLTSDKSSSTAYMELSSLTSEDSAVYYCARGGPYGWYFDVWGAGTTVTVSSASTKGPSVFPLAPCSRSTSESTAALGCLVKDYFPEPVTVSWNSGALTSGVHTFPAVLQSSGLYSLSSVVTVPSSSLGTKTYTCNVDHKPSNTKVDKRVESKYGPPCPPCPAPEFLGGPSVFLFPPKPKDTLMISRTPEVTCVVVDVSQEDPEVQFNWYVDGVEVHNAKTKPREEQFNSTYRVVSVLTVLHQDWLNGKEYKCKVSNKGLPSSIEKTISKAKGQPREPQVYTLPPSQEEMTKNQVSLTCLVKGFYPSDIAVEWESNGQPENNYKTTPPVLDSDGSFFLYSRLTVDKSRWQEGNVFSCSVMHEALHNHYTQKSLSLSPGK

SEQ ID NO: 415 - protein, 107 aa, synthetic construct
  REGION 1..107: note = synthetic
DIQMTQSPASLSASVGETVTITCRASEHIYSYLSWYQQKQGKSPQLLVYNAKTLAEGVPSRFSGSGSGTQFSLKINSLQPEDFGTYYCQHHFGSPLTFGAGTTLELK

SEQ ID NO: 416 - protein, 6 aa, synthetic construct
  REGION 1..6: note = synthetic
EHIYSY

SEQ ID NO: 417 - skipped

SEQ ID NO: 418 - protein, 9 aa, synthetic construct
  REGION 1..9: note = synthetic
QHHFGSPLT

SEQ ID NO: 419 - protein, 214 aa, synthetic construct
  REGION 1..214: note = synthetic
DIQMTQSPASLSASVGETVTITCRASEHIYSYLSWYQQKQGKSPQLLVYNAKTLAEGVPSRFSGSGSGTQFSLKINSLQPEDFGTYYCQHHFGSPLTFGAGTTLELKRTVAAPSVFIFPPSDEQLKSGTASVVCLLNNFYPREAKVQWKVDNALQSGNSQESVTEQDSKDSTYSLSSTLTLSKADYEKHKVYACEVTHQGLSSPVTKSFNRGEC

SEQ ID NO: 420 - protein, 130 aa, synthetic construct
  REGION 1..130: note = synthetic
QVHLQESGPGLVKPSETLSLTCTVSGGSVSSGIYYWSWIRQPPGKGLEWIGYIYYSGSTNYNPSLKSRVTISVDTSKNQFSLKLSSVTAADTAVYYCARDYYVSGNYYNVDYYFFGVDVWGQGTTVTVSS

SEQ ID NO: 421 - protein, 10 aa, synthetic construct
  REGION 1..10: note = synthetic
GGSVSSGIYY

SEQ ID NO: 422 - protein, 7 aa, synthetic construct
  REGION 1..7: note = synthetic
IYYSGST

SEQ ID NO: 423 - protein, 22 aa, synthetic construct
  REGION 1..22: note = synthetic
ARDYYVSGNYYNVDYYFFGVDV

SEQ ID NO: 424 - protein, 457 aa, synthetic construct
  REGION 1..457: note = synthetic
QVHLQESGPGLVKPSETLSLTCTVSGGSVSSGIYYWSWIRQPPGKGLEWIGYIYYSGSTNYNPSLKSRVTISVDTSKNQFSLKLSSVTAADTAVYYCARDYYVSGNYYNVDYYFFGVDVWGQGTTVTVSSASTKGPSVFPLAPCSRSTSESTAALGCLVKDYFPEPVTVSWNSGALTSGVHTFPAVLQSSGLYSLSSVVTVPSSSLGTKTYTCNVDHKPSNTKVDKRVESKYGPPCPPCPAPEFLGGPSVFLFPPKPKDTLMISRTPEVTCVVVDVSQEDPEVQFNWYVDGVEVHNAKTKPREEQFNSTYRVVSVLTVLHQDWLNGKEYKCKVSNKGLPSSIEKTISKAKGQPREPQVYTLPPSQEEMTKNQVSLTCLVKGFYPSDIAVEWESNGQPENNYKTTPPVLDSDGSFFLYSRLTVDKSRWQEGNVFSCSVMHEALHNHYTQKSLSLSPGK

SEQ ID NO: 425 - protein, 109 aa, synthetic construct
  REGION 1..109: note = synthetic
EIVLTQSPATLSLSPGERATLSCRASQSVSSYLAWYQQKPGQAPRLLIYDASNRATGIPARFSGSGSGTDFTLTISSLEPEDFAVYYCQQRSNWPPLFTFGPGTKVDIK

SEQ ID NO: 426 - protein, 6 aa, synthetic construct
  REGION 1..6: note = synthetic
QSVSSY

SEQ ID NO: 427 - skipped

SEQ ID NO: 428 - protein, 11 aa, synthetic construct
  REGION 1..11: note = synthetic
QQRSNWPPLFT

SEQ ID NO: 429 - protein, 216 aa, synthetic construct
  REGION 1..216: note = synthetic
EIVLTQSPATLSLSPGERATLSCRASQSVSSYLAWYQQKPGQAPRLLIYDASNRATGIPARFSGSGSGTDFTLTISSLEPEDFAVYYCQQRSNWPPLFTFGPGTKVDIKRTVAAPSVFIFPPSDEQLKSGTASVVCLLNNFYPREAKVQWKVDNALQSGNSQESVTEQDSKDSTYSLSSTLTLSKADYEKHKVYACEVTHQGLSSPVTKSFNRGEC

SEQ ID NO: 430 - protein, 119 aa, synthetic construct
  REGION 1..119: note = synthetic
QVQLVQSGAEVKKPGASVKVSCKASGYTFTEYTLHWVRQAPGQGLEWMGGINPNNGGTSYAQKFQGRVTMTRDTSTSTVYMELSSLRSEDTAVYYCARSGYYDYSFAYWGQGTLVTVSS

SEQ ID NO: 431 - protein, 10 aa, synthetic construct
  REGION 1..10: note = synthetic
GYTFTEYTLH

SEQ ID NO: 432 - protein, 10 aa, synthetic construct
  REGION 1..10: note = synthetic
GINPNNGGTS

SEQ ID NO: 433 - protein, 10 aa, synthetic construct
  REGION 1..10: note = synthetic
SGYYDYSFAY

SEQ ID NO: 434 - protein, 446 aa, synthetic construct
  REGION 1..446: note = synthetic
QVQLVQSGAEVKKPGASVKVSCKASGYTFTEYTLHWVRQAPGQGLEWMGGINPNNGGTSYAQKFQGRVTMTRDTSTSTVYMELSSLRSEDTAVYYCARSGYYDYSFAYWGQGTLVTVSSASTKGPSVFPLAPCSRSTSESTAALGCLVKDYFPEPVTVSWNSGALTSGVHTFPAVLQSSGLYSLSSVVTVPSSSLGTKTYTCNVDHKPSNTKVDKRVESKYGPPCPPCPAPEFLGGPSVFLFPPKPKDTLMISRTPEVTCVVVDVSQEDPEVQFNWYVDGVEVHNAKTKPREEQFNSTYRVVSVLTVLHQDWLNGKEYKCKVSNKGLPSSIEKTISKAKGQPREPQVYTLPPSQEEMTKNQVSLTCLVKGFYPSDIAVEWESNGQPENNYKTTPPVLDSDGSFFLYSRLTVDKSRWQEGNVFSCSVMHEALHNHYTQKSLSLSPGK

SEQ ID NO: 435 - protein, 107 aa, synthetic construct
  REGION 1..107: note = synthetic
DIQMTQSPSSLSASVGDRVTITCRASQDVKNAVVWYQQKPGKAPKLLIYSPSYRYTGVPSRFSGSGSGTDFTLTISSLQPEDFATYYCQQHYSTPFTFGQGTKLEIK

SEQ ID NO: 436 - protein, 11 aa, synthetic construct
  REGION 1..11: note = synthetic
RASQDVKNAVV

SEQ ID NO: 437 - protein, 7 aa, synthetic construct
  REGION 1..7: note = synthetic
SPSYRYT

SEQ ID NO: 438 - protein, 9 aa, synthetic construct
  REGION 1..9: note = synthetic
QQHYSTPFT

SEQ ID NO: 439 - protein, 214 aa, synthetic construct
  REGION 1..214: note = synthetic
DIQMTQSPSSLSASVGDRVTITCRASQDVKNAVVWYQQKPGKAPKLLIYSPSYRYTGVPSRFSGSGSGTDFTLTISSLQPEDFATYYCQQHYSTPFTFGQGTKLEIKRTVAAPSVFIFPPSDEQLKSGTASVVCLLNNFYPREAKVQWKVDNALQSGNSQESVTEQDSKDSTYSLSSTLTLSKADYEKHKVYACEVTHQGLSSPVTKSFNRGEC

SEQ ID NO: 440 - protein, 119 aa, synthetic construct
  REGION 1..119: note = synthetic
QVQLVQSGAEVKKPGASVKVSCKTSGYTFTEYTLHWVRQAPGQGLEWIGGINPNNGGTSYAQKFQGRVTMTVDTSTSTVYMELSSLRSEDTAVYYCAGSGYYDYSFAYWGQGTLVTVSS

SEQ ID NO: 441 - protein, 10 aa, synthetic construct
  REGION 1..10: note = synthetic
GYTFTEYTLH

SEQ ID NO: 442 - protein, 10 aa, synthetic construct
  REGION 1..10: note = synthetic
GINPNNGGTS

SEQ ID NO: 443 - protein, 10 aa, synthetic construct
  REGION 1..10: note = synthetic
SGYYDYSFAY

SEQ ID NO: 444 - protein, 446 aa, synthetic construct
  REGION 1..446: note = synthetic
QVQLVQSGAEVKKPGASVKVSCKTSGYTFTEYTLHWVRQAPGQGLEWIGGINPNNGGTSYAQKFQGRVTMTVDTSTSTVYMELSSLRSEDTAVYYCAGSGYYDYSFAYWGQGTLVTVSSASTKGPSVFPLAPCSRSTSESTAALGCLVKDYFPEPVTVSWNSGALTSGVHTFPAVLQSSGLYSLSSVVTVPSSSLGTKTYTCNVDHKPSNTKVDKRVESKYGPPCPPCPAPEFLGGPSVFLFPPKPKDTLMISRTPEVTCVVVDVSQEDPEVQFNWYVDGVEVHNAKTKPREEQFNSTYRVVSVLTVLHQDWLNGKEYKCKVSNKGLPSSIEKTISKAKGQPREPQVYTLPPSQEEMTKNQVSLTCLVKGFYPSDIAVEWESNGQPENNYKTTPPVLDSDGSFFLYSRLTVDKSRWQEGNVFSCSVMHEALHNHYTQKSLSLSPGK

SEQ ID NO: 445 - protein, 107 aa, synthetic construct; identical to SEQ ID NO: 435
  REGION 1..107: note = synthetic

SEQ ID NO: 446 - protein, 11 aa, synthetic construct
  REGION 1..11: note = synthetic
RASQDVKNAVV

SEQ ID NO: 447 - protein, 7 aa, synthetic construct
  REGION 1..7: note = synthetic
SPSYRYT

SEQ ID NO: 448 - protein, 9 aa, synthetic construct
  REGION 1..9: note = synthetic
QQHYSTPFT

SEQ ID NO: 449 - protein, 214 aa, synthetic construct; identical to SEQ ID NO: 439
  REGION 1..214: note = synthetic

SEQ ID NO: 450 - protein, 119 aa, synthetic construct; identical to SEQ ID NO: 440
  REGION 1..119: note = synthetic

SEQ ID NO: 451 - protein, 10 aa, synthetic construct
  REGION 1..10: note = synthetic
GYTFTEYTLH

SEQ ID NO: 452 - protein, 10 aa, synthetic construct
  REGION 1..10: note = synthetic
GINPNNGGTS

SEQ ID NO: 453 - protein, 10 aa, synthetic construct
  REGION 1..10: note = synthetic
SGYYDYSFAY

SEQ ID NO: 454 - protein, 446 aa, synthetic construct; identical to SEQ ID NO: 444
  REGION 1..446: note = synthetic

SEQ ID NO: 455 - protein, 107 aa, synthetic construct
  REGION 1..107: note = synthetic
DIQMTQSPSSLSASVGDRVTITCRASQDVKNAVVWYQQKPGKAPKLLIYSPSYRYTGVPSRFSGSGSGTDFTFTISSVQPEDFATYYCQQHYSTPFTFGQGTKLEIK

SEQ ID NO: 456 - protein, 11 aa, synthetic construct
  REGION 1..11: note = synthetic
RASQDVKNAVV

SEQ ID NO: 457 - protein, 7 aa, synthetic construct
  REGION 1..7: note = synthetic
SPSYRYT

SEQ ID NO: 458 - protein, 9 aa, synthetic construct
  REGION 1..9: note = synthetic
QQHYSTPFT

SEQ ID NO: 459 - protein, 214 aa, synthetic construct
  REGION 1..214: note = synthetic
DIQMTQSPSSLSASVGDRVTITCRASQDVKNAVVWYQQKPGKAPKLLIYSPSYRYTGVPSRFSGSGSGTDFTFTISSVQPEDFATYYCQQHYSTPFTFGQGTKLEIKRTVAAPSVFIFPPSDEQLKSGTASVVCLLNNFYPREAKVQWKVDNALQSGNSQESVTEQDSKDSTYSLSSTLTLSKADYEKHKVYACEVTHQGLSSPVTKSFNRGEC

SEQ ID NO: 460 - protein, 119 aa, synthetic construct
  REGION 1..119: note = synthetic
QVQLVQSGAEVKKPGASVKISCKTSGYTFTEYTLHWVRQAPGQGLEWIGGINPNNGGTSYAQKFQGRATLTVDTSTSTAYMELSSLRSEDTAVYYCAGSGYYDYSFAYWGQGTLVTVSS

SEQ ID NO: 461 - protein, 10 aa, synthetic construct
  REGION 1..10: note = synthetic
GYTFTEYTLH

SEQ ID NO: 462 - protein, 10 aa, synthetic construct
  REGION 1..10: note = synthetic
GINPNNGGTS

SEQ ID NO: 463 - protein, 10 aa, synthetic construct
  REGION 1..10: note = synthetic
SGYYDYSFAY

SEQ ID NO: 464 - protein, 446 aa, synthetic construct
  REGION 1..446: note = synthetic
QVQLVQSGAEVKKPGASVKISCKTSGYTFTEYTLHWVRQAPGQGLEWIGGINPNNGGTSYAQKFQGRATLTVDTSTSTAYMELSSLRSEDTAVYYCAGSGYYDYSFAYWGQGTLVTVSSASTKGPSVFPLAPCSRSTSESTAALGCLVKDYFPEPVTVSWNSGALTSGVHTFPAVLQSSGLYSLSSVVTVPSSSLGTKTYTCNVDHKPSNTKVDKRVESKYGPPCPPCPAPEFLGGPSVFLFPPKPKDTLMISRTPEVTCVVVDVSQEDPEVQFNWYVDGVEVHNAKTKPREEQFNSTYRVVSVLTVLHQDWLNGKEYKCKVSNKGLPSSIEKTISKAKGQPREPQVYTLPPSQEEMTKNQVSLTCLVKGFYPSDIAVEWESNGQPENNYKTTPPVLDSDGSFFLYSRLTVDKSRWQEGNVFSCSVMHEALHNHYTQKSLSLSPGK

SEQ ID NO: 465 - protein, 107 aa, synthetic construct; identical to SEQ ID NO: 435
  REGION 1..107: note = synthetic

SEQ ID NO: 466 - protein, 11 aa, synthetic construct
  REGION 1..11: note = synthetic
RASQDVKNAVV

SEQ ID NO: 467 - protein, 7 aa, synthetic construct
  REGION 1..7: note = synthetic
SPSYRYT

SEQ ID NO: 468 - protein, 9 aa, synthetic construct
  REGION 1..9: note = synthetic
QQHYSTPFT

SEQ ID NO: 469 - protein, 214 aa, synthetic construct; identical to SEQ ID NO: 439
  REGION 1..214: note = synthetic

SEQ ID NO: 470 - protein, 119 aa, synthetic construct; identical to SEQ ID NO: 460
  REGION 1..119: note = synthetic

SEQ ID NO: 471 - protein, 10 aa, synthetic construct
  REGION 1..10: note = synthetic
GYTFTEYTLH

SEQ ID NO: 472 - protein, 10 aa, synthetic construct
  REGION 1..10: note = synthetic
GINPNNGGTS

SEQ ID NO: 473 - protein, 10 aa, synthetic construct
  REGION 1..10: note = synthetic
SGYYDYSFAY

SEQ ID NO: 474 - protein, 446 aa, synthetic construct; identical to SEQ ID NO: 464
  REGION 1..446: note = synthetic

SEQ ID NO: 475 - protein, 107 aa, synthetic construct; identical to SEQ ID NO: 455
  REGION 1..107: note = synthetic

SEQ ID NO: 476 - protein, 11 aa, synthetic construct
  REGION 1..11: note = synthetic
RASQDVKNAVV

SEQ ID NO: 477 - protein, 7 aa, synthetic construct
  REGION 1..7: note = synthetic
SPSYRYT

SEQ ID NO: 478 - protein, 9 aa, synthetic construct
  REGION 1..9: note = synthetic
QQHYSTPFT

SEQ ID NO: 479 - protein, 214 aa, synthetic construct; identical to SEQ ID NO: 459
  REGION 1..214: note = synthetic

SEQ ID NO: 480 - protein, 119 aa, synthetic construct
  REGION 1..119: note = synthetic
QVQLVQSGAEVKKPGASVKISCKTSGYTFTEYTLHWVRQAPGQGLEWIGGINPNNGGTSYAQKFQGRATLTVDKSTSTAYMELSSLRSEDTAVYYCAGSGYYDYSFAYWGQGTLVTVSS

SEQ ID NO: 481 - protein, 10 aa, synthetic construct
  REGION 1..10: note = synthetic
GYTFTEYTLH

SEQ ID NO: 482 - protein, 10 aa, synthetic construct
  REGION 1..10: note = synthetic
GINPNNGGTS

SEQ ID NO: 483 - protein, 10 aa, synthetic construct
  REGION 1..10: note = synthetic
SGYYDYSFAY

SEQ ID NO: 484 - protein, 446 aa, synthetic construct
  REGION 1..446: note = synthetic
QVQLVQSGAEVKKPGASVKISCKTSGYTFTEYTLHWVRQAPGQGLEWIGGINPNNGGTSYAQKFQGRATLTVDKSTSTAYMELSSLRSEDTAVYYCAGSGYYDYSFAYWGQGTLVTVSSASTKGPSVFPLAPCSRSTSESTAALGCLVKDYFPEPVTVSWNSGALTSGVHTFPAVLQSSGLYSLSSVVTVPSSSLGTKTYTCNVDHKPSNTKVDKRVESKYGPPCPPCPAPEFLGGPSVFLFPPKPKDTLMISRTPEVTCVVVDVSQEDPEVQFNWYVDGVEVHNAKTKPREEQFNSTYRVVSVLTVLHQDWLNGKEYKCKVSNKGLPSSIEKTISKAKGQPREPQVYTLPPSQEEMTKNQVSLTCLVKGFYPSDIAVEWESNGQPENNYKTTPPVLDSDGSFFLYSRLTVDKSRWQEGNVFSCSVMHEALHNHYTQKSLSLSPGK

SEQ ID NO: 485 - protein, 107 aa, synthetic construct; identical to SEQ ID NO: 435
  REGION 1..107: note = synthetic

SEQ ID NO: 486 - protein, 11 aa, synthetic construct
  REGION 1..11: note = synthetic
RASQDVKNAVV

SEQ ID NO: 487 - protein, 7 aa, synthetic construct
  REGION 1..7: note = synthetic
SPSYRYT

SEQ ID NO: 488 - protein, 9 aa, synthetic construct
  REGION 1..9: note = synthetic
QQHYSTPFT

SEQ ID NO: 489 - protein, 214 aa, synthetic construct; identical to SEQ ID NO: 439
  REGION 1..214: note = synthetic

SEQ ID NO: 490 - protein, 119 aa, synthetic construct; identical to SEQ ID NO: 480
  REGION 1..119: note = synthetic

SEQ ID NO: 491 - protein, 10 aa, synthetic construct
  REGION 1..10: note = synthetic
GYTFTEYTLH

SEQ ID NO: 492 - protein, 10 aa, synthetic construct
  REGION 1..10: note = synthetic
GINPNNGGTS

SEQ ID NO: 493 - protein, 10 aa, synthetic construct
  REGION 1..10: note = synthetic
SGYYDYSFAY

SEQ ID NO: 494 - protein, 446 aa, synthetic construct; identical to SEQ ID NO: 484
  REGION 1..446: note = synthetic

SEQ ID NO: 495 - protein, 107 aa, synthetic construct; identical to SEQ ID NO: 455
  REGION 1..107: note = synthetic

SEQ ID NO: 496 - protein, 11 aa, synthetic construct
  REGION 1..11: note = synthetic
RASQDVKNAVV

SEQ ID NO: 497 - protein, 7 aa, synthetic construct
  REGION 1..7: note = synthetic
SPSYRYT

SEQ ID NO: 498 - protein, 9 aa, synthetic construct
  REGION 1..9: note = synthetic
QQHYSTPFT

SEQ ID NO: 499 - protein, 214 aa, synthetic construct; identical to SEQ ID NO: 459
  REGION 1..214: note = synthetic

SEQ ID NO: 500 - protein, 119 aa, synthetic construct
  REGION 1..119: note = SYNTHETIC
QVQLVQSGAEVKKPGASVKVSCKASGYTFTNYGMNWVRQAPGQGLEWMGWINTYTGEPTYAQKFQGRVTMTRDTSTSTVYMELSSLRSEDTAVYYCARGNGYYVGMDYWGQGTLVTVSS

SEQ ID NO: 501 - protein, 10 aa, synthetic construct
  REGION 1..10: note = synthetic
GYTFTNYGMN

SEQ ID NO: 502 - protein, 10 aa, synthetic construct
  REGION 1..10: note = synthetic
WINTYTGEPT

SEQ ID NO: 503 - protein, 10 aa, synthetic construct
  REGION 1..10: note = synthetic
GNGYYVGMDY

SEQ ID NO: 504 - protein, 446 aa, synthetic construct
  REGION 1..446: note = synthetic
QVQLVQSGAEVKKPGASVKVSCKASGYTFTNYGMNWVRQAPGQGLEWMGWINTYTGEPTYAQKFQGRVTMTRDTSTSTVYMELSSLRSEDTAVYYCARGNGYYVGMDYWGQGTLVTVSSASTKGPSVFPLAPCSRSTSESTAALGCLVKDYFPEPVTVSWNSGALTSGVHTFPAVLQSSGLYSLSSVVTVPSSSLGTKTYTCNVDHKPSNTKVDKRVESKYGPPCPPCPAPEFLGGPSVFLFPPKPKDTLMISRTPEVTCVVVDVSQEDPEVQFNWYVDGVEVHNAKTKPREEQFNSTYRVVSVLTVLHQDWLNGKEYKCKVSNKGLPSSIEKTISKAKGQPREPQVYTLPPSQEEMTKNQVSLTCLVKGFYPSDIAVEWESNGQPENNYKTTPPVLDSDGSFFLYSRLTVDKSRWQEGNVFSCSVMHEALHNHYTQKSLSLSPGK

SEQ ID NO: 505 - protein, 109 aa, synthetic construct
  REGION 1..109: note = synthetic
QAVVTQEPSLTVSPGGTVTLTCRSSTGAVTTSNHANWFQQKPGQAPRTLIYGTNGRGSWTPARFSGSLLGGKAALTLSGAQPEDEAEYYCALWFSNHWVFGGGTKLTVL

SEQ ID NO: 506 - protein, 14 aa, synthetic construct
  REGION 1..14: note = synthetic
RSSTGAVTTSNHAN

SEQ ID NO: 507 - protein, 7 aa, synthetic construct
  REGION 1..7: note = synthetic
GTNGRGS

SEQ ID NO: 508 - protein, 9 aa, synthetic construct
  REGION 1..9: note = synthetic
ALWFSNHWV

SEQ ID NO: 509 - protein, 214 aa, synthetic construct
  REGION 1..214: note = synthetic
QAVVTQEPSLTVSPGGTVTLTCRSSTGAVTTSNHANWFQQKPGQAPRTLIYGTNGRGSWTPARFSGSLLGGKAALTLSGAQPEDEAEYYCALWFSNHWVFGGGTKLTVLQPKAAPSVTLFPPSSEELQANKATLVCLISDFYPGAVTVAWKADSSPVKAGVETTTPSKQSNNKYAASSYLSLTPEQWKSHRSYSCQVTHEGSTVEKTVAPTECS

SEQ ID NO: 510 - protein, 119 aa, synthetic construct
  REGION 1..119: note = synthetic
QVQLVQSGAEVKKPGASVKVSCKASGYTFTNYGMNWVRQAPGQGLEWMGWINTYTGEPTYAQKFQGRVTMTLDTSTSTAYMELSSLRSEDTAVYYCSRGNGYYVGMDYWGQGTLVTVSS

SEQ ID NO: 511 - protein, 10 aa, synthetic construct
  REGION 1..10: note = synthetic
GYTFTNYGMN

SEQ ID NO: 512 - protein, 10 aa, synthetic construct
  REGION 1..10: note = synthetic
WINTYTGEPT

SEQ ID NO: 513 - protein, 10 aa, synthetic construct
  REGION 1..10: note = synthetic
GNGYYVGMDY

SEQ ID NO: 514 - protein, 446 aa, synthetic construct
  REGION 1..446: note = synthetic
QVQLVQSGAEVKKPGASVKVSCKASGYTFTNYGMNWVRQAPGQGLEWMGWINTYTGEPTYAQKFQGRVTMTLDTSTSTAYMELSSLRSEDTAVYYCSRGNGYYVGMDYWGQGTLVTVSSASTKGPSVFPLAPCSRSTSESTAALGCLVKDYFPEPVTVSWNSGALTSGVHTFPAVLQSSGLYSLSSVVTVPSSSLGTKTYTCNVDHKPSNTKVDKRVESKYGPPCPPCPAPEFLGGPSVFLFPPKPKDTLMISRTPEVTCVVVDVSQEDPEVQFNWYVDGVEVHNAKTKPREEQFNSTYRVVSVLTVLHQDWLNGKEYKCKVSNKGLPSSIEKTISKAKGQPREPQVYTLPPSQEEMTKNQVSLTCLVKGFYPSDIAVEWESNGQPENNYKTTPPVLDSDGSFFLYSRLTVDKSRWQEGNVFSCSVMHEALHNHYTQKSLSLSPGK

SEQ ID NO: 515 - protein, 109 aa, synthetic construct
  REGION 1..109: note = synthetic
QAVVTQEPSLTVSPGGTVTLTCGSSTGAVTTSNHANWVQQKPGQAFRGLIRGTNGRGSWTPARFSGSLLGGKAALTISGAQPEDEAEYYCALWFSNHWVFGGGTKLTVL

SEQ ID NO: 516 - protein, 14 aa, synthetic construct
  REGION 1..14: note = synthetic
GSSTGAVTTSNHAN

SEQ ID NO: 517 - protein, 7 aa, synthetic construct
  REGION 1..7: note = synthetic
GTNGRGS

SEQ ID NO: 518 - protein, 9 aa, synthetic construct
  REGION 1..9: note = synthetic
ALWFSNHWV

SEQ ID NO: 519 - protein, 214 aa, synthetic construct
  REGION 1..214: note = synthetic
QAVVTQEPSLTVSPGGTVTLTCGSSTGAVTTSNHANWVQQKPGQAFRGLIRGTNGRGSWTPARFSGSLLGGKAALTISGAQPEDEAEYYCALWFSNHWVFGGGTKLTVLQPKAAPSVTLFPPSSEELQANKATLVCLISDFYPGAVTVAWKADSSPVKAGVETTTPSKQSNNKYAASSYLSLTPEQWKSHRSYSCQVTHEGSTVEKTVAPTECS

SEQ ID NO: 520 - protein, 119 aa, synthetic construct; identical to SEQ ID NO: 510
  REGION 1..119: note = synthetic

SEQ ID NO: 521 - protein, 10 aa, synthetic construct
  REGION 1..10: note = synthetic
GYTFTNYGMN

SEQ ID NO: 522 - protein, 10 aa, synthetic construct
  REGION 1..10: note = synthetic
WINTYTGEPT

SEQ ID NO: 523 - protein, 10 aa, synthetic construct
  REGION 1..10: note = synthetic
GNGYYVGMDY

SEQ ID NO: 524 - protein, 446 aa, synthetic construct; identical to SEQ ID NO: 514
  REGION 1..446: note = synthetic

SEQ ID NO: 525 - protein, 109 aa, synthetic construct
  REGION 1..109: note = synthetic
QAVVTQEPSLTVSPGGTVTLTCGSSTGAVTTSNHANWVQQKPGQAFRGLIRGTNGRGSGVPARFSGSLLGGKAALTISGAQPEDEAEYYCALWFSNHWVFGGGTKLTVL

SEQ ID NO: 526 - protein, 14 aa, synthetic construct
  REGION 1..14: note = synthetic
GSSTGAVTTSNHAN

SEQ ID NO: 527 - protein, 7 aa, synthetic construct
  REGION 1..7: note = synthetic
GTNGRGS

SEQ ID NO: 528 - protein, 9 aa, synthetic construct
  REGION 1..9: note = synthetic
ALWFSNHWV

SEQ ID NO: 529 - protein, 214 aa, synthetic construct
  REGION 1..214: note = synthetic
QAVVTQEPSLTVSPGGTVTLTCGSSTGAVTTSNHANWVQQKPGQAFRGLIRGTNGRGSGVPARFSGSLLGGKAALTISGAQPEDEAEYYCALWFSNHWVFGGGTKLTVLQPKAAPSVTLFPPSSEELQANKATLVCLISDFYPGAVTVAWKADSSPVKAGVETTTPSKQSNNKYAASSYLSLTPEQWKSHRSYSCQVTHEGSTVEKTVAPTECS

SEQ ID NO: 530 - protein, 119 aa, synthetic construct
  REGION 1..119: note = synthetic
QVQLVQSGAEVKKPGASVKISCKASGYTFTNYGMNWVRQAPGQGLEWMGWINTYTGEPTYAQKFQGRFTFTLDTSTSTAYLEISSLRSEDTAVYYCSRGNGYYVGMDYWGQGTLVTVSS

SEQ ID NO: 531 - protein, 10 aa, synthetic construct
  REGION 1..10: note = synthetic
GYTFTNYGMN

SEQ ID NO: 532 - protein, 10 aa, synthetic construct
  REGION 1..10: note = synthetic
WINTYTGEPT

SEQ ID NO: 533 - protein, 10 aa, synthetic construct
  REGION 1..10: note = synthetic
GNGYYVGMDY

SEQ ID NO: 534 - protein, 446 aa, synthetic construct
  REGION 1..446: note = synthetic
QVQLVQSGAEVKKPGASVKISCKASGYTFTNYGMNWVRQAPGQGLEWMGWINTYTGEPTYAQKFQGRFTFTLDTSTSTAYLEISSLRSEDTAVYYCSRGNGYYVGMDYWGQGTLVTVSSASTKGPSVFPLAPCSRSTSESTAALGCLVKDYFPEPVTVSWNSGALTSGVHTFPAVLQSSGLYSLSSVVTVPSSSLGTKTYTCNVDHKPSNTKVDKRVESKYGPPCPPCPAPEFLGGPSVFLFPPKPKDTLMISRTPEVTCVVVDVSQEDPEVQFNWYVDGVEVHNAKTKPREEQFNSTYRVVSVLTVLHQDWLNGKEYKCKVSNKGLPSSIEKTISKAKGQPREPQVYTLPPSQEEMTKNQVSLTCLVKGFYPSDIAVEWESNGQPENNYKTTPPVLDSDGSFFLYSRLTVDKSRWQEGNVFSCSVMHEALHNHYTQKSLSLSPGK

SEQ ID NO: 535 - protein, 109 aa, synthetic construct; identical to SEQ ID NO: 515
  REGION 1..109: note = synthetic

SEQ ID NO: 536 - protein, 14 aa, synthetic construct
  REGION 1..14: note = synthetic
GSSTGAVTTSNHAN

SEQ ID NO: 537 - protein, 7 aa, synthetic construct
  REGION 1..7: note = synthetic
GTNGRGS

SEQ ID NO: 538 - protein, 9 aa, synthetic construct
  REGION 1..9: note = synthetic
ALWFSNHWV

SEQ ID NO: 539 - protein, 214 aa, synthetic construct; identical to SEQ ID NO: 519
  REGION 1..214: note = synthetic

SEQ ID NO: 540 - protein, 119 aa, synthetic construct; identical to SEQ ID NO: 530
  REGION 1..119: note = synthetic

SEQ ID NO: 541 - protein, 10 aa, synthetic construct
  REGION 1..10: note = synthetic
GYTFTNYGMN

SEQ ID NO: 542 - protein, 10 aa, synthetic construct
  REGION 1..10: note = synthetic
WINTYTGEPT

SEQ ID NO: 543 - protein, 10 aa, synthetic construct
  REGION 1..10: note = synthetic
GNGYYVGMDY

SEQ ID NO: 544 - protein, 446 aa, synthetic construct; identical to SEQ ID NO: 534
  REGION 1..446: note = synthetic

SEQ ID NO: 545 - protein, 109 aa, synthetic construct; identical to SEQ ID NO: 525
  REGION 1..109: note = synthetic

SEQ ID NO: 546 - protein, 14 aa, synthetic construct
  REGION 1..14: note = synthetic
GSSTGAVTTSNHAN

SEQ ID NO: 547 - protein, 7 aa, synthetic construct
  REGION 1..7: note = synthetic
GTNGRGS

SEQ ID NO: 548 - protein, 9 aa, synthetic construct
  REGION 1..9: note = synthetic
ALWFSNHWV

SEQ ID NO: 549 - protein, 214 aa, synthetic construct; identical to SEQ ID NO: 529
  REGION 1..214: note = synthetic

SEQ ID NO: 550 - protein, 119 aa, synthetic construct
  REGION 1..119: note = synthetic
QVQLVQSGAEVKKPGASVKISCKASGYTFTNYGMNWVRQAPGQGLEWMGWINTYTGEPTYAQKFQGRFTFTLDASTSTAYLEISSLRSEDTAVYYCSRGNGYYVGMDYWGQGTLVTVSS

SEQ ID NO: 551 - protein, 10 aa, synthetic construct
  REGION 1..10: note = synthetic
GYTFTNYGMN

SEQ ID NO: 552 - protein, 10 aa, synthetic construct
  REGION 1..10: note = synthetic
WINTYTGEPT

SEQ ID NO: 553 - protein, 10 aa, synthetic construct
  REGION 1..10: note = synthetic
GNGYYVGMDY

SEQ ID NO: 554 - protein, 446 aa, synthetic construct; identical to SEQ ID NO: 534
  REGION 1..446: note = synthetic

SEQ ID NO: 555 - protein, 109 aa, synthetic construct; identical to SEQ ID NO: 515
  REGION 1..109: note = synthetic

SEQ ID NO: 556 - protein, 14 aa, synthetic construct
  REGION 1..14: note = synthetic
GSSTGAVTTSNHAN

SEQ ID NO: 557 - protein, 7 aa, synthetic construct
  REGION 1..7: note = synthetic
GTNGRGS

SEQ ID NO: 558 - protein, 9 aa, synthetic construct
  REGION 1..9: note = synthetic
ALWFSNHWV

SEQ ID NO: 559 - protein, 214 aa, synthetic construct; identical to SEQ ID NO: 519
  REGION 1..214: note = synthetic

SEQ ID NO: 560 - protein, 119 aa, synthetic construct; identical to SEQ ID NO: 550
  REGION 1..119: note = synthetic

SEQ ID NO: 561 - protein, 10 aa, synthetic construct
  REGION 1..10: note = synthetic
GYTFTNYGMN

SEQ ID NO: 562 - protein, 10 aa, synthetic construct
  REGION 1..10: note = synthetic
WINTYTGEPT

SEQ ID NO: 563 - protein, 10 aa, synthetic construct
  REGION 1..10: note = synthetic
GNGYYVGMDY

SEQ ID NO: 564 - protein, 446 aa, synthetic construct
  REGION 1..446: note = synthetic
QVQLVQSGAEVKKPGASVKISCKASGYTFTNYGMNWVRQAPGQGLEWMGWINTYTGEPTYAQKFQGRFTFTLDASTSTAYLEISSLRSEDTAVYYCSRGNGYYVGMDYWGQGTLVTVSSASTKGPSVFPLAPCSRSTSESTAALGCLVKDYFPEPVTVSWNSGALTSGVHTFPAVLQSSGLYSLSSVVTVPSSSLGTKTYTCNVDHKPSNTKVDKRVESKYGPPCPPCPAPEFLGGPSVFLFPPKPKDTLMISRTPEVTCVVVDVSQEDPEVQFNWYVDGVEVHNAKTKPREEQFNSTYRVVSVLTVLHQDWLNGKEYKCKVSNKGLPSSIEKTISKAKGQPREPQVYTLPPSQEEMTKNQVSLTCLVKGFYPSDIAVEWESNGQPENNYKTTPPVLDSDGSFFLYSRLTVDKSRWQEGNVFSCSVMHEALHNHYTQKSLSLSPGK

SEQ ID NO: 565 - protein, 109 aa, synthetic construct; identical to SEQ ID NO: 525
  REGION 1..109: note = synthetic

SEQ ID NO: 566 - protein, 14 aa, synthetic construct
  REGION 1..14: note = synthetic
GSSTGAVTTSNHAN

SEQ ID NO: 567 - protein, 7 aa, synthetic construct
  REGION 1..7: note = synthetic
GTNGRGS

SEQ ID NO: 568 - protein, 9 aa, synthetic construct
  REGION 1..9: note = synthetic
ALWFSNHWV

SEQ ID NO: 569 - protein, 214 aa, synthetic construct; identical to SEQ ID NO: 529
  REGION 1..214: note = synthetic

SEQ ID NO: 570 - protein, 119 aa, synthetic construct
  REGION 1..119: note = synthetic
EVQLVESGGGLVQPGGSLRLSCAASGFTFSSYIMSWVRQAPGKGLEWVSTISGGGTNTYYADSVKGRFTISRDNSKNTLYLQMNSLRAEDTAVYYCARWLLSYYAMDYWGQGTLVTVSS

SEQ ID NO: 571 - protein, 10 aa, synthetic construct
  REGION 1..10: note = synthetic
GFTFSSYIMS

SEQ ID NO: 572 - protein, 10 aa, synthetic construct
  REGION 1..10: note = synthetic
TISGGGTNTY

SEQ ID NO: 573 - protein, 10 aa, synthetic construct
  REGION 1..10: note = synthetic
WLLSYYAMDY

SEQ ID NO: 574 - protein, 446 aa, synthetic construct
  REGION 1..446: note = synthetic
EVQLVESGGGLVQPGGSLRLSCAASGFTFSSYIMSWVRQAPGKGLEWVSTISGGGTNTYYADSVKGRFTISRDNSKNTLYLQMNSLRAEDTAVYYCARWLLSYYAMDYWGQGTLVTVSSASTKGPSVFPLAPCSRSTSESTAALGCLVKDYFPEPVTVSWNSGALTSGVHTFPAVLQSSGLYSLSSVVTVPSSSLGTKTYTCNVDHKPSNTKVDKRVESKYGPPCPPCPAPEFLGGPSVFLFPPKPKDTLMISRTPEVTCVVVDVSQEDPEVQFNWYVDGVEVHNAKTKPREEQFNSTYRVVSVLTVLHQDWLNGKEYKCKVSNKGLPSSIEKTISKAKGQPREPQVYTLPPSQEEMTKNQVSLTCLVKGFYPSDIAVEWESNGQPENNYKTTPPVLDSDGSFFLYSRLTVDKSRWQEGNVFSCSVMHEALHNHYTQKSLSLSPGK

SEQ ID NO: 575 - protein, 107 aa, synthetic construct
  REGION 1..107: note = synthetic
DIQMTQSPSSLSASVGDRVTITCRASQNINVWLTWYQQKPGKAPKLLIYKASNLHTGVPSRFSGSGSGTDFTLTISSLQPEDFATYYCQQGQSYPYTFGQGTKLEIK

SEQ ID NO: 576 - protein, 11 aa, synthetic construct
  REGION 1..11: note = synthetic
RASQNINVWLT

SEQ ID NO: 577 - protein, 7 aa, synthetic construct
  REGION 1..7: note = synthetic
KASNLHT

SEQ ID NO: 578 - protein, 9 aa, synthetic construct
  REGION 1..9: note = synthetic
QQGQSYPYT

SEQ ID NO: 579 - protein, 214 aa, synthetic construct
  REGION 1..214: note = synthetic
DIQMTQSPSSLSASVGDRVTITCRASQNINVWLTWYQQKPGKAPKLLIYKASNLHTGVPSRFSGSGSGTDFTLTISSLQPEDFATYYCQQGQSYPYTFGQGTKLEIKRTVAAPSVFIFPPSDEQLKSGTASVVCLLNNFYPREAKVQWKVDNALQSGNSQESVTEQDSKDSTYSLSSTLTLSKADYEKHKVYACEVTHQGLSSPVTKSFNRGEC

SEQ ID NO: 580 - protein, 119 aa, synthetic construct
  REGION 1..119: note = synthetic
EVQLVESGGGLVQPGGSLRLSCAASGFTFSSYIMSWVRQAPGKGLEWVSTISGGGTNTYYADSVKGRFTISRDNSKNTLYLQMNSLRAEDTAVYYCAKWLLSYYAMDYWGQGTLVTVSS

SEQ ID NO: 581 - protein, 10 aa, synthetic construct
  REGION 1..10: note = synthetic
GFTFSSYIMS

SEQ ID NO: 582 - protein, 10 aa, synthetic construct
  REGION 1..10: note = synthetic
TISGGGTNTY

SEQ ID NO: 583 - protein, 10 aa, synthetic construct
  REGION 1..10: note = synthetic
WLLSYYAMDY

SEQ ID NO: 584 - protein, 446 aa, synthetic construct
  REGION 1..446: note = synthetic
EVQLVESGGGLVQPGGSLRLSCAASGFTFSSYIMSWVRQAPGKGLEWVSTISGGGTNTYYADSVKGRFTISRDNSKNTLYLQMNSLRAEDTAVYYCAKWLLSYYAMDYWGQGTLVTVSSASTKGPSVFPLAPCSRSTSESTAALGCLVKDYFPEPVTVSWNSGALTSGVHTFPAVLQSSGLYSLSSVVTVPSSSLGTKTYTCNVDHKPSNTKVDKRVESKYGPPCPPCPAPEFLGGPSVFLFPPKPKDTLMISRTPEVTCVVVDVSQEDPEVQFNWYVDGVEVHNAKTKPREEQFNSTYRVVSVLTVLHQDWLNGKEYKCKVSNKGLPSSIEKTISKAKGQPREPQVYTLPPSQEEMTKNQVSLTCLVKGFYPSDIAVEWESNGQPENNYKTTPPVLDSDGSFFLYSRLTVDKSRWQEGNVFSCSVMHEALHNHYTQKSLSLSPGK

SEQ ID NO: 585 - protein, 107 aa, synthetic construct; identical to SEQ ID NO: 575
  REGION 1..107: note = synthetic

SEQ ID NO: 586 - protein, 11 aa, synthetic construct
  REGION 1..11: note = synthetic
RASQNINVWLT

SEQ ID NO: 587 - protein, 7 aa, synthetic construct
  REGION 1..7: note = synthetic
KASNLHT

SEQ ID NO: 588 - protein, 9 aa, synthetic construct
  REGION 1..9: note = synthetic
QQGQSYPYT

SEQ ID NO: 589 - protein, 214 aa, synthetic construct; identical to SEQ ID NO: 579
  REGION 1..214: note = synthetic

SEQ ID NO: 590 - protein, 119 aa, synthetic construct
  REGION 1..119: note = synthetic
EVQLVESGGGLVQPGGSLRLSCAASGFTFSSYIMSWVRQAPGKGLEWVATISGGGTNTYYADSVKGRFTISRDNSKNTLYLQMNSLRAEDTAVYYCAKWLLSYYAMDYWGQGTLVTVSS

SEQ ID NO: 591 - protein, 10 aa, synthetic construct
  REGION 1..10: note = synthetic
GFTFSSYIMS

SEQ ID NO: 592 - protein, 10 aa, synthetic construct
  REGION 1..10: note = synthetic
TISGGGTNTY

SEQ ID NO: 593 - protein, 10 aa, synthetic construct
  REGION 1..10: note = synthetic
WLLSYYAMDY

SEQ ID NO: 594 - protein, 446 aa, synthetic construct
  REGION 1..446: note = synthetic
EVQLVESGGGLVQPGGSLRLSCAASGFTFSSYIMSWVRQAPGKGLEWVATISGGGTNTYYADSVKGRFTISRDNSKNTLYLQMNSLRAEDTAVYYCAKWLLSYYAMDYWGQGTLVTVSSASTKGPSVFPLAPCSRSTSESTAALGCLVKDYFPEPVTVSWNSGALTSGVHTFPAVLQSSGLYSLSSVVTVPSSSLGTKTYTCNVDHKPSNTKVDKRVESKYGPPCPPCPAPEFLGGPSVFLFPPKPKDTLMISRTPEVTCVVVDVSQEDPEVQFNWYVDGVEVHNAKTKPREEQFNSTYRVVSVLTVLHQDWLNGKEYKCKVSNKGLPSSIEKTISKAKGQPREPQVYTLPPSQEEMTKNQVSLTCLVKGFYPSDIAVEWESNGQPENNYKTTPPVLDSDGSFFLYSRLTVDKSRWQEGNVFSCSVMHEALHNHYTQKSLSLSPGK

SEQ ID NO: 595 - protein, 107 aa, synthetic construct; identical to SEQ ID NO: 575
  REGION 1..107: note = synthetic

SEQ ID NO: 596 - protein, 11 aa, synthetic construct
  REGION 1..11: note = synthetic
RASQNINVWLT

SEQ ID NO: 597 - protein, 7 aa, synthetic construct
  REGION 1..7: note = synthetic
KASNLHT

SEQ ID NO: 598 - protein, 9 aa, synthetic construct
  REGION 1..9: note = synthetic
QQGQSYPYT

SEQ ID NO: 599 - protein, 214 aa, synthetic construct; identical to SEQ ID NO: 579
  REGION 1..214: note = synthetic

SEQ ID NO: 600 - protein, 119 aa, synthetic construct; identical to SEQ ID NO: 580
  REGION 1..119: note = synthetic

SEQ ID NO: 601 - protein, 10 aa, synthetic construct
  REGION 1..10: note = synthetic
GFTFSSYIMS

SEQ ID NO: 602 - protein, 10 aa, synthetic construct
  REGION 1..10: note = synthetic
TISGGGTNTY

SEQ ID NO: 603 - protein, 10 aa, synthetic construct
  REGION 1..10: note = synthetic
WLLSYYAMDY

SEQ ID NO: 604 - protein, 446 aa, synthetic construct; identical to SEQ ID NO: 584
  REGION 1..446: note = synthetic

SEQ ID NO: 605 - protein, 107 aa, synthetic construct
  REGION 1..107: note = synthetic
DIQMTQSPSSLSASVGDRITITCRASQNINVWLTWYQQKPGKAPKLLIYKASNLHTGVPSRFSGSGSGTDFTLTISSLQPEDFATYYCQQGQSYPYTFGQGTKLEIK

SEQ ID NO: 606 - protein, 11 aa, synthetic construct
  REGION 1..11: note = sfynthetic
RASQNINVWLT

SEQ ID NO: 607 - protein, 7 aa, synthetic construct
  REGION 1..7: note = synthetic
KASNLHT

SEQ ID NO: 608 - protein, 9 aa, synthetic construct
  REGION 1..9: note = synthetic
QQGQSYPYT

SEQ ID NO: 609 - protein, 214 aa, synthetic construct
  REGION 1..214: note = synthetic
DIQMTQSPSSLSASVGDRITITCRASQNINVWLTWYQQKPGKAPKLLIYKASNLHTGVPSRFSGSGSGTDFTLTISSLQPEDFATYYCQQGQSYPYTFGQGTKLEIKRTVAAPSVFIFPPSDEQLKSGTASVVCLLNNFYPREAKVQWKVDNALQSGNSQESVTEQDSKDSTYSLSSTLTLSKADYEKHKVYACEVTHQGLSSPVTKSFNRGEC

SEQ ID NO: 610 - protein, 119 aa, synthetic construct; identical to SEQ ID NO: 590
  REGION 1..119: note = synthetic

SEQ ID NO: 611 - protein, 10 aa, synthetic construct
  REGION 1..10: note = synthetic
GFTFSSYIMS

SEQ ID NO: 612 - protein, 10 aa, synthetic construct
  REGION 1..10: note = synthetic
TISGGGTNTY

SEQ ID NO: 613 - protein, 10 aa, synthetic construct
  REGION 1..10: note = synthetic
WLLSYYAMDY

SEQ ID NO: 614 - protein, 446 aa, synthetic construct; identical to SEQ ID NO: 594
  REGION 1..446: note = synthetic

SEQ ID NO: 615 - protein, 107 aa, synthetic construct; identical to SEQ ID NO: 605
  REGION 1..107: note = synthetic

SEQ ID NO: 616 - protein, 11 aa, synthetic construct
  REGION 1..11: note = synthetic
RASQNINVWLT

SEQ ID NO: 617 - protein, 7 aa, synthetic construct
  REGION 1..7: note = synthetic
KASNLHT

SEQ ID NO: 618 - protein, 9 aa, synthetic construct
  REGION 1..9: note = synthetic
QQGQSYPYT

SEQ ID NO: 619 - protein, 214 aa, synthetic construct; identical to SEQ ID NO: 609
  REGION 1..214: note = synthetic

SEQ ID NO: 620 - protein, 119 aa, synthetic construct; identical to SEQ ID NO: 580
  REGION 1..119: note = synthetic

SEQ ID NO: 621 - protein, 10 aa, synthetic construct
  REGION 1..10: note = synthetic
GFTFSSYIMS

SEQ ID NO: 622 - protein, 10 aa, synthetic construct
  REGION 1..10: note = synthetic
TISGGGTNTY

SEQ ID NO: 623 - protein, 10 aa, synthetic construct
  REGION 1..10: note = synthetic
WLLSYYAMDY

SEQ ID NO: 624 - protein, 446 aa, synthetic construct; identical to SEQ ID NO: 584
  REGION 1..446: note = synthetic

SEQ ID NO: 625 - protein, 446 aa, synthetic construct; identical to SEQ ID NO: 584
  REGION 1..446: note = synthetic

SEQ ID NO: 626 - protein, 11 aa, synthetic construct
  REGION 1..11: note = synthetic
RASQNINVWLT

SEQ ID NO: 627 - protein, 7 aa, synthetic construct
  REGION 1..7: note = synthetic
KASKSHT

SEQ ID NO: 628 - protein, 9 aa, synthetic construct
  REGION 1..9: note = synthetic
QQGQSYPYT

SEQ ID NO: 629 - protein, 214 aa, synthetic construct
  REGION 1..214: note = synthetic
DIQMTQSPSSLSASVGDRVTITCRASQNINVWLTWYQQKPGKAPKLLIYKASKSHTGVPSRFSGSGSGTDFTLTISSLQPEDFATYYCQQGQSYPYTFGQGTKLEIKRTVAAPSVFIFPPSDEQLKSGTASVVCLLNNFYPREAKVQWKVDNALQSGNSQESVTEQDSKDSTYSLSSTLTLSKADYEKHKVYACEVTHQGLSSPVTKSFNRGEC

SEQ ID NO: 630 - protein, 119 aa, synthetic construct; identical to SEQ ID NO: 590
  REGION 1..119: note = synthetic

SEQ ID NO: 631 - protein, 10 aa, synthetic construct
  REGION 1..10: note = synthetic
GFTFSSYIMS

SEQ ID NO: 632 - protein, 10 aa, synthetic construct
  REGION 1..10: note = synthetic
TISGGGTNTY

SEQ ID NO: 633 - protein, 10 aa, synthetic construct
  REGION 1..10: note = sunthetic
WLLSYYAMDY

SEQ ID NO: 634 - protein, 446 aa, synthetic construct; identical to SEQ ID NO: 594
  REGION 1..446: note = synthetic

SEQ ID NO: 635 - protein, 107 aa, synthetic construct
  REGION 1..107: note = synthetic
DIQMTQSPSSLSASVGDRVTITCRASQNINVWLTWYQQKPGKAPKLLIYKASKSHTGVPSRFSGSGSGTDFTLTISSLQPEDFATYYCQQGQSYPYTFGQGTKLEIK

SEQ ID NO: 636 - protein, 11 aa, synthetic construct
  REGION 1..11: note = sfynthetic
RASQNINVWLT

SEQ ID NO: 637 - protein, 7 aa, synthetic construct
  REGION 1..7: note = synthetic
KASKSHT

SEQ ID NO: 638 - protein, 9 aa, synthetic construct
  REGION 1..9: note = synthetic
QQGQSYPYT

SEQ ID NO: 639 - protein, 214 aa, synthetic construct; identical to SEQ ID NO: 629
  REGION 1..214: note = synthetic

SEQ ID NO: 640 - protein, 119 aa, synthetic construct; identical to SEQ ID NO: 580
  REGION 1..119: note = synthetic

SEQ ID NO: 641 - protein, 10 aa, synthetic construct
  REGION 1..10: note = synthetic
GFTFSSYIMS

SEQ ID NO: 642 - protein, 10 aa, synthetic construct
  REGION 1..10: note = synthetic
TISGGGTNTY

SEQ ID NO: 643 - protein, 10 aa, synthetic construct
  REGION 1..10: note = synthetic
WLLSYYAMDY

SEQ ID NO: 644 - protein, 446 aa, synthetic construct; identical to SEQ ID NO: 584
  REGION 1..446: note = synthetic

SEQ ID NO: 645 - protein, 107 aa, synthetic construct
  REGION 1..107: note = synthetic
DIQMTQSPSSLSASVGDRITITCRASQNINVWLTWYQQKPGKAPKLLIYKASKSHTGVPSRFSGSGSGTDFTLTISSLQPEDFATYYCQQGQSYPYTFGQGTKLEIK

SEQ ID NO: 646 - protein, 11 aa, synthetic construct
  REGION 1..11: note = synthetic
RASQNINVWLT

SEQ ID NO: 647 - protein, 7 aa, synthetic construct
  REGION 1..7: note = synthetic
KASKSHT

SEQ ID NO: 648 - protein, 9 aa, synthetic construct
  REGION 1..9: note = synthetic
QQGQSYPYT

SEQ ID NO: 649 - protein, 214 aa, synthetic construct
  REGION 1..214: note = synthetic
DIQMTQSPSSLSASVGDRITITCRASQNINVWLTWYQQKPGKAPKLLIYKASKSHTGVPSRFSGSGSGTDFTLTISSLQPEDFATYYCQQGQSYPYTFGQGTKLEIKRTVAAPSVFIFPPSDEQLKSGTASVVCLLNNFYPREAKVQWKVDNALQSGNSQESVTEQDSKDSTYSLSSTLTLSKADYEKHKVYACEVTHQGLSSPVTKSFNRGEC

SEQ ID NO: 650 - protein, 119 aa, synthetic construct; identical to SEQ ID NO: 590
  REGION 1..119: note = synthetic

SEQ ID NO: 651 - protein, 10 aa, synthetic construct
  REGION 1..10: note = synthetcpic
GFTFSSYIMS

SEQ ID NO: 652 - protein, 10 aa, synthetic construct
  REGION 1..10: note = synthetic
TISGGGTNTY

SEQ ID NO: 653 - protein, 10 aa, synthetic construct
  REGION 1..10: note = synthetic
WLLSYYAMDY

SEQ ID NO: 654 - protein, 446 aa, synthetic construct; identical to SEQ ID NO: 594
  REGION 1..446: note = synthetic

SEQ ID NO: 655 - protein, 107 aa, synthetic construct; identical to SEQ ID NO: 645
  REGION 1..107: note = synthetic

SEQ ID NO: 656 - protein, 11 aa, synthetic construct
  REGION 1..11: note = synthetic
RASQNINVWLT

SEQ ID NO: 657 - protein, 7 aa, synthetic construct
  REGION 1..7: note = sfynthetic
KASKSHT

SEQ ID NO: 658 - protein, 9 aa, synthetic construct
  REGION 1..9: note = synthetic
QQGQSYPYT

SEQ ID NO: 659 - protein, 214 aa, synthetic construct; identical to SEQ ID NO: 649
  REGION 1..214: note = synthetic

SEQ ID NO: 660 - protein, 119 aa, synthetic construct
  REGION 1..119: note = synthetic
QVQLVQSGAEVKKPGASVKVSCKASGYTITNYGMNWVRQAPGQGLEWMGWINTYTGEPTYAQKFQGRVTMTRDTSTSTVYMELSSLRSEDTAVYYCARGNGNPLGMDYWGQGTLVTVSS

SEQ ID NO: 661 - protein, 10 aa, synthetic construct
  REGION 1..10: note = synthetic
GYTITNYGMN

SEQ ID NO: 662 - protein, 10 aa, synthetic construct
  REGION 1..10: note = synthetic
WINTYTGEPT

SEQ ID NO: 663 - protein, 10 aa, synthetic construct
  REGION 1..10: note = synthetic
GNGNPLGMDY

SEQ ID NO: 664 - protein, 446 aa, synthetic construct
  REGION 1..446: note = synthetic
QVQLVQSGAEVKKPGASVKVSCKASGYTITNYGMNWVRQAPGQGLEWMGWINTYTGEPTYAQKFQGRVTMTRDTSTSTVYMELSSLRSEDTAVYYCARGNGNPLGMDYWGQGTLVTVSSASTKGPSVFPLAPCSRSTSESTAALGCLVKDYFPEPVTVSWNSGALTSGVHTFPAVLQSSGLYSLSSVVTVPSSSLGTKTYTCNVDHKPSNTKVDKRVESKYGPPCPPCPAPEFLGGPSVFLFPPKPKDTLMISRTPEVTCVVVDVSQEDPEVQFNWYVDGVEVHNAKTKPREEQFNSTYRVVSVLTVLHQDWLNGKEYKCKVSNKGLPSSIEKTISKAKGQPREPQVYTLPPSQEEMTKNQVSLTCLVKGFYPSDIAVEWESNGQPENNYKTTPPVLDSDGSFFLYSRLTVDKSRWQEGNVFSCSVMHEALHNHYTQKSLSLSPGK

SEQ ID NO: 665 - protein, 106 aa, synthetic construct
  REGION 1..106: note = synthetic
EIVLTQSPATLSLSPGERATLSCGNGNPLGMDYWYQQKPGQAPRLLIYDTSKLASGIPARFSGSGSGTDFTLTISSLEPEDFAVYYCFQGSGYPLTFGQGTKLEIK

SEQ ID NO: 666 - protein, 10 aa, synthetic construct
  REGION 1..10: note = synthetic
GNGNPLGMDY

SEQ ID NO: 667 - protein, 7 aa, synthetic construct
  REGION 1..7: note = synthetic
DTSKLAS

SEQ ID NO: 668 - protein, 9 aa, synthetic construct
  REGION 1..9: note = synthetic
FQGSGYPLT

SEQ ID NO: 669 - protein, 213 aa, synthetic construct
  REGION 1..213: note = synthetic
EIVLTQSPATLSLSPGERATLSCGNGNPLGMDYWYQQKPGQAPRLLIYDTSKLASGIPARFSGSGSGTDFTLTISSLEPEDFAVYYCFQGSGYPLTFGQGTKLEIKRTVAAPSVFIFPPSDEQLKSGTASVVCLLNNFYPREAKVQWKVDNALQSGNSQESVTEQDSKDSTYSLSSTLTLSKADYEKHKVYACEVTHQGLSSPVTKSFNRGEC

SEQ ID NO: 670 - protein, 119 aa, synthetic construct
  REGION 1..119: note = synthetic
QVQLVQSGAEVKKPGASVKVSCKASGYTITNYGMNWVRQAPGQGLEWMGWINTYTGEPTYAQKFQGRFTMTLDTSTSTVYMELSSLRSEDTAVYYCARGNGNPLGMDYWGQGTLVTVSS

SEQ ID NO: 671 - protein, 10 aa, synthetic construct
  REGION 1..10: note = synthetic
GYTITNYGMN

SEQ ID NO: 672 - protein, 10 aa, synthetic construct
  REGION 1..10: note = synthetic
WINTYTGEPT

SEQ ID NO: 673 - protein, 10 aa, synthetic construct
  REGION 1..10: note = synthetic
GNGNPLGMDY

SEQ ID NO: 674 - protein, 446 aa, synthetic construct
  REGION 1..446: note = synthetic
QVQLVQSGAEVKKPGASVKVSCKASGYTITNYGMNWVRQAPGQGLEWMGWINTYTGEPTYAQKFQGRFTMTLDTSTSTVYMELSSLRSEDTAVYYCARGNGNPLGMDYWGQGTLVTVSSASTKGPSVFPLAPCSRSTSESTAALGCLVKDYFPEPVTVSWNSGALTSGVHTFPAVLQSSGLYSLSSVVTVPSSSLGTKTYTCNVDHKPSNTKVDKRVESKYGPPCPPCPAPEFLGGPSVFLFPPKPKDTLMISRTPEVTCVVVDVSQEDPEVQFNWYVDGVEVHNAKTKPREEQFNSTYRVVSVLTVLHQDWLNGKEYKCKVSNKGLPSSIEKTISKAKGQPREPQVYTLPPSQEEMTKNQVSLTCLVKGFYPSDIAVEWESNGQPENNYKTTPPVLDSDGSFFLYSRLTVDKSRWQEGNVFSCSVMHEALHNHYTQKSLSLSPGK

SEQ ID NO: 675 - protein, 106 aa, synthetic construct
  REGION 1..106: note = synthetic
EIVLTQSPATLSLSPGERATLSCGNGNPLGMDYWYQQKPGQAPRLLIYDTSKLASGIPARFSGSGSGTDYTLTISSLEPEDFAVYYCFQGSGYPLTFGQGTKLEIK

SEQ ID NO: 676 - protein, 10 aa, synthetic construct
  REGION 1..10: note = synthetic
GNGNPLGMDY

SEQ ID NO: 677 - protein, 7 aa, synthetic construct
  REGION 1..7: note = synthetic
DTSKLAS

SEQ ID NO: 678 - protein, 9 aa, synthetic construct
  REGION 1..9: note = synthetic
FQGSGYPLT

SEQ ID NO: 679 - protein, 213 aa, synthetic construct
  REGION 1..213: note = synthetic
EIVLTQSPATLSLSPGERATLSCGNGNPLGMDYWYQQKPGQAPRLLIYDTSKLASGIPARFSGSGSGTDYTLTISSLEPEDFAVYYCFQGSGYPLTFGQGTKLEIKRTVAAPSVFIFPPSDEQLKSGTASVVCLLNNFYPREAKVQWKVDNALQSGNSQESVTEQDSKDSTYSLSSTLTLSKADYEKHKVYACEVTHQGLSSPVTKSFNRGEC

SEQ ID NO: 680 - protein, 119 aa, synthetic construct; identical to SEQ ID NO: 670
  REGION 1..119: note = synthetic

SEQ ID NO: 681 - protein, 10 aa, synthetic construct
  REGION 1..10: note = synthetic
GYTITNYGMN

SEQ ID NO: 682 - protein, 10 aa, synthetic construct
  REGION 1..10: note = synthetic
WINTYTGEPT

SEQ ID NO: 683 - protein, 10 aa, synthetic construct
  REGION 1..10: note = synthetic
GNGNPLGMDY

SEQ ID NO: 684 - protein, 446 aa, synthetic construct; identical to SEQ ID NO: 674
  REGION 1..446: note = synthetic

SEQ ID NO: 685 - protein, 106 aa, synthetic construct
  REGION 1..106: note = synthetic
EIVLTQSPATLSLSPGERATLSCGNGNPLGMDYWYQQKPGQAPRLWIYDTSKLASGVPARFSGSGSGTDYTLTISSLEPEDFAVYYCFQGSGYPLTFGQGTKLEIK

SEQ ID NO: 686 - protein, 10 aa, synthetic construct
  REGION 1..10: note = synthetic
GNGNPLGMDY

SEQ ID NO: 687 - protein, 7 aa, synthetic construct
  REGION 1..7: note = synthetic
DTSKLAS

SEQ ID NO: 688 - protein, 9 aa, synthetic construct
  REGION 1..9: note = synthetic
FQGSGYPLT

SEQ ID NO: 689 - protein, 213 aa, synthetic construct
  REGION 1..213: note = synthetic
EIVLTQSPATLSLSPGERATLSCGNGNPLGMDYWYQQKPGQAPRLWIYDTSKLASGVPARFSGSGSGTDYTLTISSLEPEDFAVYYCFQGSGYPLTFGQGTKLEIKRTVAAPSVFIFPPSDEQLKSGTASVVCLLNNFYPREAKVQWKVDNALQSGNSQESVTEQDSKDSTYSLSSTLTLSKADYEKHKVYACEVTHQGLSSPVTKSFNRGEC

SEQ ID NO: 690 - protein, 119 aa, synthetic construct; identical to SEQ ID NO: 670
  REGION 1..119: note = synthetic

SEQ ID NO: 691 - protein, 10 aa, synthetic construct
  REGION 1..10: note = synthetic
GYTITNYGMN

SEQ ID NO: 692 - protein, 10 aa, synthetic construct
  REGION 1..10: note = synthetic
WINTYTGEPT

SEQ ID NO: 693 - protein, 10 aa, synthetic construct
  REGION 1..10: note = synthetic
GNGNPLGMDY

SEQ ID NO: 694 - protein, 446 aa, synthetic construct; identical to SEQ ID NO: 674
  REGION 1..446: note = synthetic

SEQ ID NO: 695 - protein, 106 aa, synthetic construct
  REGION 1..106: note = synthetic
EIVLTQSPATLSLSPGERVTMSCGNGNPLGMDYWYQQKPGQAPRLWIYDTSKLASGVPARFSGSGSGTDYTLTISSMEPEDFAVYYCFQGSGYPLTFGQGTKLEIK

SEQ ID NO: 696 - protein, 10 aa, synthetic construct
  REGION 1..10: note = synthetic
GNGNPLGMDY

SEQ ID NO: 697 - protein, 7 aa, synthetic construct
  REGION 1..7: note = synthetic
DTSKLAS

SEQ ID NO: 698 - protein, 9 aa, synthetic construct
  REGION 1..9: note = synthetic
FQGSGYPLT

SEQ ID NO: 699 - protein, 213 aa, synthetic construct
  REGION 1..213: note = synthetic
EIVLTQSPATLSLSPGERVTMSCGNGNPLGMDYWYQQKPGQAPRLWIYDTSKLASGVPARFSGSGSGTDYTLTISSMEPEDFAVYYCFQGSGYPLTFGQGTKLEIKRTVAAPSVFIFPPSDEQLKSGTASVVCLLNNFYPREAKVQWKVDNALQSGNSQESVTEQDSKDSTYSLSSTLTLSKADYEKHKVYACEVTHQGLSSPVTKSFNRGEC

SEQ ID NO: 700 - protein, 119 aa, synthetic construct
  REGION 1..119: note = synthetic
QVQLVQSGAEVKKPGASVKISCKASGYTITNYGMNWVRQAPGQGLEWMGWINTYTGEPTYAQKFQGRFTITLDTSTSTVYLEISSLRSEDTAVYYCARGNGNPLGMDYWGQGTLVTVSS

SEQ ID NO: 701 - protein, 10 aa, synthetic construct
  REGION 1..10: note = synthetic
GYTITNYGMN

SEQ ID NO: 702 - protein, 10 aa, synthetic construct
  REGION 1..10: note = synthetic
WINTYTGEPT

SEQ ID NO: 703 - protein, 10 aa, synthetic construct
  REGION 1..10: note = synthetic
GNGNPLGMDY

SEQ ID NO: 704 - protein, 446 aa, synthetic construct
  REGION 1..446: note = synthetic
QVQLVQSGAEVKKPGASVKISCKASGYTITNYGMNWVRQAPGQGLEWMGWINTYTGEPTYAQKFQGRFTITLDTSTSTVYLEISSLRSEDTAVYYCARGNGNPLGMDYWGQGTLVTVSSASTKGPSVFPLAPCSRSTSESTAALGCLVKDYFPEPVTVSWNSGALTSGVHTFPAVLQSSGLYSLSSVVTVPSSSLGTKTYTCNVDHKPSNTKVDKRVESKYGPPCPPCPAPEFLGGPSVFLFPPKPKDTLMISRTPEVTCVVVDVSQEDPEVQFNWYVDGVEVHNAKTKPREEQFNSTYRVVSVLTVLHQDWLNGKEYKCKVSNKGLPSSIEKTISKAKGQPREPQVYTLPPSQEEMTKNQVSLTCLVKGFYPSDIAVEWESNGQPENNYKTTPPVLDSDGSFFLYSRLTVDKSRWQEGNVFSCSVMHEALHNHYTQKSLSLSPGK

SEQ ID NO: 705 - protein, 106 aa, synthetic construct; identical to SEQ ID NO: 675
  REGION 1..106: note = synthetic

SEQ ID NO: 706 - protein, 10 aa, synthetic construct
  REGION 1..10: note = synthetic
GNGNPLGMDY

SEQ ID NO: 707 - protein, 7 aa, synthetic construct
  REGION 1..7: note = synthetic
DTSKLAS

SEQ ID NO: 708 - protein, 9 aa, synthetic construct
  REGION 1..9: note = synthetic
FQGSGYPLT

SEQ ID NO: 709 - protein, 213 aa, synthetic construct; identical to SEQ ID NO: 679
  REGION 1..213: note = synthetic

SEQ ID NO: 710 - protein, 119 aa, synthetic construct; identical to SEQ ID NO: 700
  REGION 1..119: note = synthetic

SEQ ID NO: 711 - protein, 10 aa, synthetic construct
  REGION 1..10: note = synthetic
GYTITNYGMN

SEQ ID NO: 712 - protein, 10 aa, synthetic construct
  REGION 1..10: note = synthetic
WINTYTGEPT

SEQ ID NO: 713 - protein, 10 aa, synthetic construct
  REGION 1..10: note = synthetic
GNGNPLGMDY

SEQ ID NO: 714 - protein, 446 aa, synthetic construct; identical to SEQ ID NO: 704
  REGION 1..446: note = synthetic

SEQ ID NO: 715 - protein, 106 aa, synthetic construct; identical to SEQ ID NO: 685
  REGION 1..106: note = synthetic

SEQ ID NO: 716 - protein, 10 aa, synthetic construct
  REGION 1..10: note = synthetic
GNGNPLGMDY

SEQ ID NO: 717 - protein, 7 aa, synthetic construct
  REGION 1..7: note = synthetic
DTSKLAS

SEQ ID NO: 718 - protein, 9 aa, synthetic construct
  REGION 1..9: note = synthetic
FQGSGYPLT

SEQ ID NO: 719 - protein, 213 aa, synthetic construct; identical to SEQ ID NO: 689
  REGION 1..213: note = synthetic

SEQ ID NO: 720 - protein, 119 aa, synthetic construct; identical to SEQ ID NO: 700
  REGION 1..119: note = synthetic

SEQ ID NO: 721 - protein, 10 aa, synthetic construct
  REGION 1..10: note = synthetic
GYTITNYGMN

SEQ ID NO: 722 - protein, 10 aa, synthetic construct
  REGION 1..10: note = synthetic
WINTYTGEPT

SEQ ID NO: 723 - protein, 10 aa, synthetic construct
  REGION 1..10: note = synthetic
GNGNPLGMDY

SEQ ID NO: 724 - protein, 446 aa, synthetic construct; identical to SEQ ID NO: 704
  REGION 1..446: note = synthetic

SEQ ID NO: 725 - protein, 106 aa, synthetic construct; identical to SEQ ID NO: 695
  REGION 1..106: note = synthetic

SEQ ID NO: 726 - protein, 10 aa, synthetic construct
  REGION 1..10: note = synthetic
GNGNPLGMDY

SEQ ID NO: 727 - protein, 7 aa, synthetic construct
  REGION 1..7: note = synthetic
DTSKLAS

SEQ ID NO: 728 - protein, 9 aa, synthetic construct
  REGION 1..9: note = synthetic
FQGSGYPLT

SEQ ID NO: 729 - protein, 213 aa, synthetic construct; identical to SEQ ID NO: 699
  REGION 1..213: note = synthetic

SEQ ID NO: 730 - protein, 119 aa, synthetic construct; identical to SEQ ID NO: 580
  REGION 1..119: note = synthetic

SEQ ID NO: 731 - protein, 10 aa, synthetic construct
  REGION 1..10: note = synthetic
GFTFSSYIMS

SEQ ID NO: 732 - protein, 10 aa, synthetic construct
  REGION 1..10: note = synthetic
TISGGGTNTY

SEQ ID NO: 733 - protein, 10 aa, synthetic construct
  REGION 1..10: note = synthetic
WLLSYYAMDY

SEQ ID NO: 734 - protein, 446 aa, synthetic construct; identical to SEQ ID NO: 584
  REGION 1..446: note = synthetic

SEQ ID NO: 735 - protein, 107 aa, synthetic construct
  REGION 1..107: note = synthetic
DIQMTQSPSSLSASVGDRVTITCRASQNINVWLSWYQQKPGKAPKLLIYKASKSHTGVPSRFSGSGSGTDFTLTISSLQPEDFATYYCQQGQSYPYTFGQGTKLEIK

SEQ ID NO: 736 - protein, 11 aa, synthetic construct
  REGION 1..11: note = synthetic
RASQNINVWLS

SEQ ID NO: 737 - protein, 7 aa, synthetic construct
  REGION 1..7: note = synthetic
KASKSHT

SEQ ID NO: 738 - protein, 9 aa, synthetic construct
  REGION 1..9: note = synthetic
QQGQSYPYT

SEQ ID NO: 739 - protein, 214 aa, synthetic construct
  REGION 1..214: note = synthetic
DIQMTQSPSSLSASVGDRVTITCRASQNINVWLSWYQQKPGKAPKLLIYKASKSHTGVPSRFSGSGSGTDFTLTISSLQPEDFATYYCQQGQSYPYTFGQGTKLEIKRTVAAPSVFIFPPSDEQLKSGTASVVCLLNNFYPREAKVQWKVDNALQSGNSQESVTEQDSKDSTYSLSSTLTLSKADYEKHKVYACEVTHQGLSSPVTKSFNRGEC

SEQ ID NO: 740 - protein, 119 aa, synthetic construct; identical to SEQ ID NO: 580
  REGION 1..119: note = synthetic

SEQ ID NO: 741 - protein, 10 aa, synthetic construct
  REGION 1..10: note = synthetic
GFTFSSYIMS

SEQ ID NO: 742 - protein, 10 aa, synthetic construct
  REGION 1..10: note = synthetic
TISGGGTNTY

SEQ ID NO: 743 - protein, 10 aa, synthetic construct
  REGION 1..10: note = synthetic
WLLSYYAMDY

SEQ ID NO: 744 - protein, 446 aa, synthetic construct; identical to SEQ ID NO: 584
  REGION 1..446: note = synthetic

SEQ ID NO: 745 - protein, 107 aa, synthetic construct
  REGION 1..107: note = synthetic
DIQMTQSPSSLSASVGDRITITCRASQNINVWLSWYQQKPGKAPKLLIYKASKSHTGVPSRFSGSGSGTDFTLTISSLQPEDFATYYCQQGQSYPYTFGQGTKLEIK

SEQ ID NO: 746 - protein, 11 aa, synthetic construct
  REGION 1..11: note = synthetic
RASQNINVWLS

SEQ ID NO: 747 - protein, 7 aa, synthetic construct
  REGION 1..7: note = synthetic
KASKSHT

SEQ ID NO: 748 - protein, 9 aa, synthetic construct
  REGION 1..9: note = synthetic
QQGQSYPYT

SEQ ID NO: 749 - protein, 214 aa, synthetic construct
  REGION 1..214: note = synthetic
DIQMTQSPSSLSASVGDRITITCRASQNINVWLSWYQQKPGKAPKLLIYKASKSHTGVPSRFSGSGSGTDFTLTISSLQPEDFATYYCQQGQSYPYTFGQGTKLEIKRTVAAPSVFIFPPSDEQLKSGTASVVCLLNNFYPREAKVQWKVDNALQSGNSQESVTEQDSKDSTYSLSSTLTLSKADYEKHKVYACEVTHQGLSSPVTKSFNRGEC

SEQ ID NO: 750 - protein, 119 aa, synthetic construct; identical to SEQ ID NO: 590
  REGION 1..119: note = synthetic

SEQ ID NO: 751 - protein, 10 aa, synthetic construct
  REGION 1..10: note = synthetic
GFTFSSYIMS

SEQ ID NO: 752 - protein, 10 aa, synthetic construct
  REGION 1..10: note = synthetic
TISGGGTNTY

SEQ ID NO: 753 - protein, 10 aa, synthetic construct
  REGION 1..10: note = synthetic
WLLSYYAMDY

SEQ ID NO: 754 - protein, 446 aa, synthetic construct; identical to SEQ ID NO: 594
  REGION 1..446: note = synthetic

SEQ ID NO: 755 - protein, 107 aa, synthetic construct; identical to SEQ ID NO: 735
  REGION 1..107: note = synthetic

SEQ ID NO: 756 - protein, 11 aa, synthetic construct
  REGION 1..11: note = synthetic
RASQNINVWLS

SEQ ID NO: 757 - protein, 7 aa, synthetic construct
  REGION 1..7: note = synthetic
KASKSHT

SEQ ID NO: 758 - protein, 9 aa, synthetic construct
  REGION 1..9: note = synthetic
QQGQSYPYT

SEQ ID NO: 759 - protein, 214 aa, synthetic construct; identical to SEQ ID NO: 739
  REGION 1..214: note = synthetic

SEQ ID NO: 760 - protein, 119 aa, synthetic construct; identical to SEQ ID NO: 590
  REGION 1..119: note = synthetic

SEQ ID NO: 761 - protein, 10 aa, synthetic construct
  REGION 1..10: note = sythetic
GFTFSSYIMS

SEQ ID NO: 762 - protein, 10 aa, synthetic construct
  REGION 1..10: note = synthetic
TISGGGTNTY

SEQ ID NO: 763 - protein, 10 aa, synthetic construct
  REGION 1..10: note = synthetic
WLLSYYAMDY

SEQ ID NO: 764 - protein, 446 aa, synthetic construct; identical to SEQ ID NO: 594
  REGION 1..446: note = synthetic

SEQ ID NO: 765 - protein, 107 aa, synthetic construct; identical to SEQ ID NO: 745
  REGION 1..107: note = synthetic

SEQ ID NO: 766 - protein, 11 aa, synthetic construct
  REGION 1..11: note = synthetic
RASQNINVWLS

SEQ ID NO: 767 - protein, 7 aa, synthetic construct
  REGION 1..7: note = synthetic
KASKSHT

SEQ ID NO: 768 - protein, 9 aa, synthetic construct
  REGION 1..9: note = synthetic
QQGQSYPYT

SEQ ID NO: 769 - protein, 214 aa, synthetic construct; identical to SEQ ID NO: 749
  REGION 1..214: note = synthetic

SEQ ID NO: 770 - protein, 117 aa, synthetic construct
  REGION 1..117: note = synthetic
EVQLQQSGPELVKPGASMKISCKASGYSFTGYTMNWVRQSHGKNLEWLGLIFPYNGGTSYNQNFKGKATLTVDTSSSTAYMELLSLTSVDSAVYYCARGVRFALDYWGQGTSVSVSS

SEQ ID NO: 771 - protein, 10 aa, synthetic construct
  REGION 1..10: note = synthetic
GYSFTGYTMN

SEQ ID NO: 772 - protein, 10 aa, synthetic construct
  REGION 1..10: note = synthetic
LIFPYNGGTS

SEQ ID NO: 773 - protein, 8 aa, synthetic construct
  REGION 1..8: note = synthetic
GVRFALDY

SEQ ID NO: 774 - skipped

SEQ ID NO: 775 - protein, 112 aa, synthetic construct
  REGION 1..112: note = synthetic
DVVMTQTPLSLPVSFGDQVSISCRSSQSLANSYGNTYLSWYLHKPGQSPQLLIYEISNRFSGVPDRFSGSGSGTDFTLNISTIKPEDLGMYYCLQGTHQPWTFGGGTKLEIK

SEQ ID NO: 776 - protein, 16 aa, synthetic construct
  REGION 1..16: note = synthetic
RSSQSLANSYGNTYLS

SEQ ID NO: 777 - protein, 7 aa, synthetic construct
  REGION 1..7: note = synthetic
EISNRFS

SEQ ID NO: 778 - protein, 9 aa, synthetic construct
  REGION 1..9: note = synthetic
LQGTHQPWT

SEQ ID NO: 779 - skipped

SEQ ID NO: 780 - protein, 119 aa, synthetic construct; identical to SEQ ID NO: 410
  REGION 1..119: note = synthetic

SEQ ID NO: 781 - protein, 8 aa, synthetic construct
  REGION 1..8: note = synthetic
GYTFSSYV

SEQ ID NO: 782 - protein, 8 aa, synthetic construct
  REGION 1..8: note = synthetic
IDPYNDGA

SEQ ID NO: 783 - protein, 12 aa, synthetic construct
  REGION 1..12: note = synthetic
ARGGPYGWYFDV

SEQ ID NO: 784 - protein, 443 aa, synthetic construct
  REGION 1..443: note = synthetic
EVQLQQSGPELVKPGSSVKMSCKASGYTFSSYVMHWVKQKPGQGLEWIGYIDPYNDGAKYNEKFKGKATLTSDKSSSTAYMELSSLTSEDSAVYYCARGGPYGWYFDVWGAGTTVTVSSAKTTPPSVYPLAPGSAAQTNSMVTLGCLVKGYFPEPVTVTWNSGSLSSGVHTFPAVLQSDLYTLSSSVTVPSSTWPSETVTCNVAHPASSTKVDKKIVPRDCGCKPCICTVPEVSSVFIFPPKPKDVLTITLTPKVTCVVVDISKDDPEVQFSWFVDDVEVHTAQTQPREEQFNSTFRSVSELPIMHQDWLNGKEFKCRVNSAAFPAPIEKTISKTKGRPKAPQVYTIPPPKEQMAKDKVSLTCMITDFFPEDITVEWQWNGQPAENYKNTQPIMDTDGSYFVYSKLNVQKSNWEAGNTFTCSVLHEGLHNHHTEKSLSHSPGK

SEQ ID NO: 785 - protein, 107 aa, synthetic construct; identical to SEQ ID NO: 415
  REGION 1..107: note = synthetic

SEQ ID NO: 786 - protein, 6 aa, synthetic construct
  REGION 1..6: note = synthetic
EHIYSY

SEQ ID NO: 787 - skipped

SEQ ID NO: 788 - protein, 9 aa, synthetic construct
  REGION 1..9: note = synthetic
QHHFGSPLT

SEQ ID NO: 789 - protein, 214 aa, synthetic construct
  REGION 1..214: note = synthetic
DIQMTQSPASLSASVGETVTITCRASEHIYSYLSWYQQKQGKSPQLLVYNAKTLAEGVPSRFSGSGSGTQFSLKINSLQPEDFGTYYCQHHFGSPLTFGAGTTLELKRADAAPTVSIFPPSSEQLTSGGASVVCFLNNFYPKDINVKWKIDGSERQNGVLNSWTDQDSKDSTYSMSSTLTLTKDEYERHNSYTCEATHKTSTSPIVKSFNRNEC

SEQ ID NO: 790 - protein, 130 aa, synthetic construct; identical to SEQ ID NO: 420
  REGION 1..130: note = synthetic

SEQ ID NO: 791 - protein, 10 aa, synthetic construct
  REGION 1..10: note = synthetic
GGSVSSGIYY

SEQ ID NO: 792 - protein, 7 aa, synthetic construct
  REGION 1..7: note = synthetic
IYYSGST

SEQ ID NO: 793 - protein, 22 aa, synthetic construct
  REGION 1..22: note = synthetic
ARDYYVSGNYYNVDYYFFGVDV

SEQ ID NO: 794 - protein, 454 aa, synthetic construct
  REGION 1..454: note = synthetic
QVHLQESGPGLVKPSETLSLTCTVSGGSVSSGIYYWSWIRQPPGKGLEWIGYIYYSGSTNYNPSLKSRVTISVDTSKNQFSLKLSSVTAADTAVYYCARDYYVSGNYYNVDYYFFGVDVWGQGTTVTVSSAKTTPPSVYPLAPGSAAQTNSMVTLGCLVKGYFPEPVTVTWNSGSLSSGVHTFPAVLQSDLYTLSSSVTVPSSTWPSETVTCNVAHPASSTKVDKKIVPRDCGCKPCICTVPEVSSVFIFPPKPKDVLTITLTPKVTCVVVDISKDDPEVQFSWFVDDVEVHTAQTQPREEQFNSTFRSVSELPIMHQDWLNGKEFKCRVNSAAFPAPIEKTISKTKGRPKAPQVYTIPPPKEQMAKDKVSLTCMITDFFPEDITVEWQWNGQPAENYKNTQPIMDTDGSYFVYSKLNVQKSNWEAGNTFTCSVLHEGLHNHHTEKSLSHSPGK

SEQ ID NO: 795 - protein, 109 aa, synthetic construct; identical to SEQ ID NO: 425
  REGION 1..109: note = synthetic

SEQ ID NO: 796 - protein, 6 aa, synthetic construct
  REGION 1..6: note = synthetic
QSVSSY

SEQ ID NO: 797 - skipped

SEQ ID NO: 798 - protein, 11 aa, synthetic construct
  REGION 1..11: note = synthetic
QQRSNWPPLFT

SEQ ID NO: 799 - protein, 216 aa, synthetic construct
  REGION 1..216: note = synthetic
EIVLTQSPATLSLSPGERATLSCRASQSVSSYLAWYQQKPGQAPRLLIYDASNRATGIPARFSGSGSGTDFTLTISSLEPEDFAVYYCQQRSNWPPLFTFGPGTKVDIKRADAAPTVSIFPPSSEQLTSGGASVVCFLNNFYPKDINVKWKIDGSERQNGVLNSWTDQDSKDSTYSMSSTLTLTKDEYERHNSYTCEATHKTSTSPIVKSFNRNEC

SEQ ID NO: 800 - protein, 119 aa, synthetic construct
  REGION 1..119: note = synthetic
DVQLVESGGGLVQPGGSRKLSCAASGFTFSNFGMHWVRQAPEKGLEWVAFISSGSSSIYYADTVKGRFTISRDNPKNTLFLQMTSLRSEDTAMYYCARMRLDYYAMDYWGQGTSVTVSS

SEQ ID NO: 801 - protein, 5 aa, synthetic construct
  REGION 1..5: note = synthetic
NFGMH

SEQ ID NO: 802 - protein, 17 aa, synthetic construct
  REGION 1..17: note = synthetic
FISSGSSSIYYADTVKG

SEQ ID NO: 803 - protein, 10 aa, synthetic construct
  REGION 1..10: note = synthetic
MRLDYYAMDY

SEQ ID NO: 804 - protein, 107 aa, synthetic construct
  REGION 1..107: note = synthetic
DVQITQSPSYLAASPGETITINCRASKSISKYLAWYQEKPGKTNKLLIYSGSTLQSGIPSRFSGSGSGTDFTLTISSLEPEDFAMYYCQQHNEYPWTFGGGTKLEIK

SEQ ID NO: 805 - protein, 11 aa, synthetic construct
  REGION 1..11: note = synthetic
RASKSISKYLA

SEQ ID NO: 806 - protein, 7 aa, synthetic construct
  REGION 1..7: note = synthetic
SGSTLQS

SEQ ID NO: 807 - protein, 7 aa, synthetic construct
  REGION 1..7: note = synthetic
SGSTLQS

SEQ ID NO: 808 - protein, 119 aa, synthetic construct
  REGION 1..119: note = synthetic
EVQLQQSGPELVKPGASVKISCKTSGYTFTEYTMHWVKQSHGKNLEWIGGINPNNGGTSYNQKFKGRATLTVDKSSSTAYMELRSLTSDDSAVYYCARPGWYNYAMDYWGQGTSVTVSS

SEQ ID NO: 809 - protein, 5 aa, synthetic construct
  REGION 1..5: note = synthetic
EYTMH

SEQ ID NO: 810 - protein, 17 aa, synthetic construct
  REGION 1..17: note = synthetic
GINPNNGGTSYNQKFKG

SEQ ID NO: 811 - protein, 10 aa, synthetic construct
  REGION 1..10: note = synthetic
PGWYNYAMDY

SEQ ID NO: 812 - protein, 107 aa, synthetic construct
  REGION 1..107: note = synthetic
DIVMTQSHKFMSTSVGDRVNITCKASQGVSTAVAWYQQKPGQSPKLLIYSASYRYTGVPDRFTGSGSGTDFTFTISSVQAEDLAVYHCQQHYITPWTFGGGTKLEIK

SEQ ID NO: 813 - protein, 11 aa, synthetic construct
  REGION 1..11: note = synthetic
KASQGVSTAVA

SEQ ID NO: 814 - protein, 7 aa, synthetic construct
  REGION 1..7: note = synthetic
SASYRYT

SEQ ID NO: 815 - protein, 9 aa, synthetic construct
  REGION 1..9: note = synthetic
QQHYITPWT

SEQ ID NO: 816 - protein, 119 aa, synthetic construct
  REGION 1..119: note = synthetic
EVQLVESGGGLVKPGGSLKLSCAASGFAFSDYDMSWVRQTPEKRLEWVAYISDGGYNTYYPDTVKGRFTISRDNAKNTLYLQMSSLKSEDTAIYYCARQILLRYYFDYWGQGTTLTVSS

SEQ ID NO: 817 - protein, 5 aa, synthetic construct
  REGION 1..5: note = synthetic
DYDMS

SEQ ID NO: 818 - protein, 17 aa, synthetic construct
  REGION 1..17: note = synthetic
YISDGGYNTYYPDTVKG

SEQ ID NO: 819 - protein, 10 aa, synthetic construct
  REGION 1..10: note = synthetic
QILLRYYFDY

SEQ ID NO: 820 - protein, 113 aa, synthetic construct
  REGION 1..113: note = synthetic
DIVMSQSPSSLAVSVGEKVTMTCKSSQSLLYSSNQKNYLAWYQQKPGQSPKLLIYWASTRESGVPDRFTGSGSGTDFTLTISSVKAEDLAVYYCQQYHSYPWTFGGGTKLEIK

SEQ ID NO: 821 - protein, 17 aa, synthetic construct
  REGION 1..17: note = synthetic
KSSQSLLYSSNQKNYLA

SEQ ID NO: 822 - protein, 7 aa, synthetic construct
  REGION 1..7: note = synthetic
WASTRES

SEQ ID NO: 823 - protein, 9 aa, synthetic construct
  REGION 1..9: note = synthetic
QQYHSYPWT

SEQ ID NO: 824 - protein, 119 aa, synthetic construct
  REGION 1..119: note = synthetic
EVQLVESGGGLVQPGGSLRLSCAASGFTFSNFGMHWVRQAPGKGLEWVAFISSGSSSIYYADTVKGRFTISRDNAKNSLYLQMNSLRAEDTAVYYCARMRLDYYAMDYWGQGTMVTVSS

SEQ ID NO: 825 - protein, 107 aa, synthetic construct
  REGION 1..107: note = synthetic
DIQMTQSPSSLSASVGDRVTITCRASKSISKYLAWYQQKPGKAPKLLIYSGSTLQSGVPSRFSGSGSGTDFTLTISSLQPEDFATYYCQQHNEYPWTFGGGTKVEIK

SEQ ID NO: 826 - protein, 138 aa, synthetic construct
  REGION 1..138: note = synthetic
MDSRLNLVFLVLILKGVQCEVQLVESGGGLVQPGGSLRLSCAASGFTFSNFGMHWVRQAPGKGLEWVAFISSGSSSIYYADTVKGRFTISRDNAKNSLYLQMNSLRAEDTAVYYCARMRLDYYAMDYWGQGTMVTVSS

SEQ ID NO: 827 - protein, 127 aa, synthetic construct
  REGION 1..127: note = synthetic
MRFQVQVLGLLLLWISGAQCDIQMTQSPSSLSASVGDRVTITCRASKSISKYLAWYQQKPGKAPKLLIYSGSTLQSGVPSRFSGSGSGTDFTLTISSLQPEDFATYYCQQHNEYPWTFGGGTKVEIK

SEQ ID NO: 828 - protein, 119 aa, synthetic construct
  REGION 1..119: note = synthetic
EVQLVESGGGLTQPGKSLKLSCEASGFTFSSFTMHWVRQSPGKGLEWVAFIRSGSGIVFYADAVRGRFTISRDNAKNLLFLQMNDLKSEDTAMYYCARRPLGHNTFDSWGQGTLVTVSS

SEQ ID NO: 829 - protein, 10 aa, synthetic construct
  REGION 1..10: note = sythetic
GFTFSSFTMH

SEQ ID NO: 830 - protein, 17 aa, synthetic construct
  REGION 1..17: note = synthetic
FIRSGSGIVFYADAVRG

SEQ ID NO: 831 - protein, 10 aa, synthetic construct
  REGION 1..10: note = synthetic
RPLGHNTFDS

SEQ ID NO: 832 - protein, 114 aa, synthetic construct
  REGION 1..114: note = synthetic
DIVMTQSPSSLAVSPGEKVTMTCKSSQSLYYSGVKENLLAWYQQKPGQSPKLLIYYASIRFTGVPDRFTGSGSGTDYTLTITSVQAEDMGQYFCQQGINNPLTFGDGTKLEIKR

SEQ ID NO: 833 - protein, 17 aa, synthetic construct
  REGION 1..17: note = synthetic
KSSQSLYYSGVKENLLA

SEQ ID NO: 834 - protein, 6 aa, synthetic construct
  REGION 1..6: note = synthetic
ASIRFT

SEQ ID NO: 835 - protein, 9 aa, synthetic construct
  REGION 1..9: note = synthetic
QQGINNPLT

SEQ ID NO: 836 - protein, 119 aa, synthetic construct
  REGION 1..119: note = synthetic
EVQLQQSGPELVKPGTSMKISCKASGYSFTGHLMNWVKQSHGKNLEWIGLIIPYNGGTSYNQKFKGKATLTVDKSSSTAYMELLSLTSDDSAVYFCSRGLRGFYAMDYWGQGTSVTVSS

SEQ ID NO: 837 - protein, 10 aa, synthetic construct
  REGION 1..10: note = synthetic
GYSFTGHLMN

SEQ ID NO: 838 - protein, 17 aa, synthetic construct
  REGION 1..17: note = synthetic
LIIPYNGGTSYNQKFKG

SEQ ID NO: 839 - protein, 10 aa, synthetic construct
  REGION 1..10: note = synthetic
GLRGFYAMDY

SEQ ID NO: 840 - protein, 112 aa, synthetic construct
  REGION 1..112: note = synthetic
DVVLTQTPLSLSVSFGDQVSISCRSSQSLVNSYGNTFLSWYLHKPGQSPQLLIFGISNRFSGVPDRFSGSGSGTDFTLKISTIKPEDLGMYYCLQGTHQPPTFGPGTKLEVK

SEQ ID NO: 841 - protein, 16 aa, synthetic construct
  REGION 1..16: note = synthetic
RSSQSLVNSYGNTFLS

SEQ ID NO: 842 - protein, 7 aa, synthetic construct
  REGION 1..7: note = synthetic
GISNRFS

SEQ ID NO: 843 - protein, 9 aa, synthetic construct
  REGION 1..9: note = synthetic
LQGTHQPPT

SEQ ID NO: 844 - protein, 9 aa, synthetic construct
  REGION 1..9: note = synthetic
  VARIANT 4: note = X is N, R, D, G, T, Q, S, A or K
  VARIANT 5: note = X is S, H, I, N, L, Y or Q
  VARIANT 8: note = X is M or V
YTFXXYAXH

SEQ ID NO: 845 - protein, 17 aa, synthetic construct
  REGION 1..17: note = synthetic
  VARIANT 1: note = X is W or Y
  VARIANT 3: note = X is H or N
  VARIANT 6: note = X is S,T or A
  VARIANT 7: note = X is G or A
  VARIANT 8: note = X is N, A, T or V
  VARIANT 9: note = X is E, K or L
  SITE 10: note = misc_feature - Xaa can be any naturally occurring amino acid
XIXAGXXXTXYSQKFQG

SEQ ID NO: 846 - protein, 17 aa, synthetic construct
  REGION 1..17: note = synthetic
  VARIANT 6: note = X is S, L, A, K or E
ARGLGXVGPTGTSWFDP

SEQ ID NO: 847 - protein, 11 aa, synthetic construct
  REGION 1..11: note = synthetic
RASQGISSWLA

SEQ ID NO: 848 - protein, 7 aa, synthetic construct
  REGION 1..7: note = synthetic
  VARIANT 5: note = X is L or S
EASSXES

SEQ ID NO: 849 - protein, 9 aa, synthetic construct
  REGION 1..9: note = synthetic
  VARIANT 5: note = X is S, V, Y, L, T
  VARIANT 6: note = X is F, S, Y or G
QQYRXXPFT

SEQ ID NO: 850 - protein, 9 aa, synthetic construct
  REGION 1..9: note = synthetic
  VARIANT 4: note = X is S or N
  VARIANT 5: note = X is E or S
  VARIANT 7: note = X is V or P
GTFXXYXIS

SEQ ID NO: 851 - protein, 17 aa, synthetic construct
  REGION 1..17: note = synthetic
  VARIANT 5: note = X is G, S, I or Y
  VARIANT 6: note = X is A, V or S
  VARIANT 10: note = X is N, I or V
GIIPXXGTAXYAQKFQG

SEQ ID NO: 852 - protein, 9 aa, synthetic construct
  REGION 1..9: note = synthetic
  VARIANT 6: note = X is S, G or F
ARGRHXHET

SEQ ID NO: 853 - protein, 11 aa, synthetic construct
  REGION 1..11: note = synthetic
RASQGISSWLA

SEQ ID NO: 854 - protein, 7 aa, synthetic construct
  REGION 1..7: note = synthetic
AASSLQS

SEQ ID NO: 855 - protein, 9 aa, synthetic construct
  REGION 1..9: note = synthetic
  VARIANT 3: note = X is V or L
  VARIANT 5: note = X is S or R
  VARIANT 6: note = X is L, I or F
QQXYXXPWT

SEQ ID NO: 856 - protein, 9 aa, synthetic construct
  REGION 1..9: note = synthetic
  VARIANT 4: note = X is G, S, P or D or S
  VARIANT 5: note = X is N, S or P
  VARIANT 6: note = X is T, V or Y
  VARIANT 7: note = X is A, H or I
FTFXXXXMS

SEQ ID NO: 857 - protein, 17 aa, synthetic construct
  REGION 1..17: note = synthetic
  VARIANT 4: note = X is G or A
  VARIANT 5: note = X is N, T, E or S
  VARIANT 6: note = X is A or G
  VARIANT 7: note = X is A or G
  VARIANT 8: note = X is S or G
  VARIANT 10: note = X is Y or F
AISXXXXXTXYADSVKG

SEQ ID NO: 858 - protein, 11 aa, synthetic construct
  REGION 1..11: note = synthetic
AKGPDRQVFDY

SEQ ID NO: 859 - protein, 11 aa, synthetic construct
  REGION 1..11: note = synthetic
  VARIANT 7: note = X is S or D
RASQGIXSWLA

SEQ ID NO: 860 - protein, 7 aa, synthetic construct
  REGION 1..7: note = synthetic
AASSLQS

SEQ ID NO: 861 - protein, 9 aa, synthetic construct
  REGION 1..9: note = synthetic
  VARIANT 3: note = X is A or G
  VARIANT 4: note = X is Y, R or L
  VARIANT 5: note = X is S, R, L or F
QHXXXFPYT

SEQ ID NO: 862 - protein, 11 aa, synthetic construct
  REGION 1..11: note = synthetic
  VARIANT 4: note = X is S or F
  VARIANT 6: note = X is S or P
  VARIANT 7: note = X is E or D
  VARIANT 9: note = X is G, P or Y
  VARIANT 11: note = X is G or S
GSIXSXXYXWX

SEQ ID NO: 863 - protein, 16 aa, synthetic construct
  REGION 1..16: note = synthetic
  VARIANT 1: note = X is S or V
  VARIANT 3: note = X is Y, V, F or A
  VARIANT 4: note = X is Y, F or N
  VARIANT 5: note = X is Q, A or S
  VARIANT 7: note = X is S, A or N
XIXXXGXTYYNPSLKS

SEQ ID NO: 864 - protein, 11 aa, synthetic construct
  REGION 1..11: note = synthetic
  VARIANT 5: note = X is Y, H or F
  VARIANT 8: note = X is V or L
ARGPXRQXFDY

SEQ ID NO: 865 - protein, 11 aa, synthetic construct
  REGION 1..11: note = synthetic
RASQGISSWLA

SEQ ID NO: 866 - protein, 7 aa, synthetic construct
  REGION 1..7: note = synthetic
AASSLQS

SEQ ID NO: 867 - protein, 9 aa, synthetic construct
  REGION 1..9: note = synthetic
  VARIANT 4: note = X is S, N, W or F
  VARIANT 5: note = X is S or V
QQGXXFPYT

SEQ ID NO: 868 - protein, 325 aa, synthetic construct
  REGION 1..325: note = synthetic
ASTKGPSVFPLAPCSRSTSESTAALGCLVKDYFPEPVTVSWNSGALTSGVHTFPAVLQSSGLYSLSSVVTVPSSSLGTKTYTCNVDHKPSNTKVDKRVESKYGPPCPPCPAPEFLGGPSVFLFPPKPKDTLMISRTPEVTCVVVDVSQEDPEVQFNWYVDGVEVHNAKTKPREEQFNSTYRVVSVLTVLHQDWLNGKEYKCKVSNKGLPSSIEKTISKAKGQPREPQVYTLPPSQEEMTKNQVSLTCLVKGFYPSDIAVEWESNGQPENNYKTTPPVLDSDGSFFLYSRLTVDKSRWQEGNVFSCSVMHEALHNHYTQKSLSLSG

SEQ ID NO: 869-873 - skipped (5 entries)

SEQ ID NO: 874 - protein, 132 aa, synthetic construct
  REGION 1..132: note = synthetic
EVQLVQSGAEVKKPGESLKISCKGSGYSFTSYWIGWVRQMPGKGLEWMGLIDPTNSDTRYSPSFQGQVTISADKSISTAYLQWSSLKASDTAMYYCAREPSLYVSDTGYPWRGYDYPGFAYWGQGTLVTVSS

SEQ ID NO: 875 - protein, 8 aa, synthetic construct
  REGION 1..8: note = synthetic
GYSFTSYW

SEQ ID NO: 876 - protein, 8 aa, synthetic construct
  REGION 1..8: note = synthetic
IDPTNSDT

SEQ ID NO: 877 - protein, 25 aa, synthetic construct
  REGION 1..25: note = synthetic
AREPSLYVSDTGYPWRGYDYPGFAY

SEQ ID NO: 878 - protein, 456 aa, synthetic construct
  REGION 1..456: note = synthetic
EVQLVQSGAEVKKPGESLKISCKGSGYSFTSYWIGWVRQMPGKGLEWMGLIDPTNSDTRYSPSFQGQVTISADKSISTAYLQWSSLKASDTAMYYCAREPSLYVSDTGYPWRGYDYPGFAYWGQGTLVTVSSAKTTPPSVYPLAPGSAAQTNSMVTLGCLVKGYFPEPVTVTWNSGSLSSGVHTFPAVLQSDLYTLSSSVTVPSSTWPSETVTCNVAHPASSTKVDKKIVPRDCGCKPCICTVPEVSSVFIFPPKPKDVLTITLTPKVTCVVVAISKDDPEVQFSWFVDDVEVHTAQTQPREEQFNSTFRSVSELPIMHQDWLNGKEFKCRVNSAAFPAPIEKTISKTKGRPKAPQVYTIPPPKEQMAKDKVSLTCMITDFFPEDITVEWQWNGQPAENYKNTQPIMDTDGSYFVYSKLNVQKSNWEAGNTFTCSVLHEGLHNHHTEKSLSHSPGK

SEQ ID NO: 879 - protein, 107 aa, synthetic construct
  REGION 1..107: note = synthetic
DIELTQPPSVSVSPGQTASITCSGDNLPSKSVHWYQQKPGQAPVLVIYSYKSERPSGIPERFSGSNSGNTATLTISGTQAEDEADYYCSAYDFTSVVFGGGTKLTVL

SEQ ID NO: 880 - protein, 6 aa, synthetic construct
  REGION 1..6: note = synthetic
NLPSKS

SEQ ID NO: 881 - protein, 6 aa, synthetic construct
  REGION 1..6: note = synthetic
SYKSER

SEQ ID NO: 882 - protein, 9 aa, synthetic construct
  REGION 1..9: note = synthetic
SAYDFTSVV

SEQ ID NO: 883 - protein, 213 aa, synthetic construct
  REGION 1..213: note = synthetic
DIELTQPPSVSVSPGQTASITCSGDNLPSKSVHWYQQKPGQAPVLVIYSYKSERPSGIPERFSGSNSGNTATLTISGTQAEDEADYYCSAYDFTSVVFGGGTKLTVLGQPKSSPSVTLFPPSSEELETNKATLVCTITDFYPGVVTVDWKVDGTPVTQGMETTQPSKQSNNKYMASSYLTLTARAWERHSSYSCQVTHEGHTVEKSLSRADCS

SEQ ID NO: 884 - protein, 127 aa, synthetic construct
  REGION 1..127: note = synthetic
EVQLQESGPGLVKPSQSLSLTCSVTGSSIASDYWGWIRKFPGNKMEWMGFITYSGSTSYNPSLKSRISITRDTSKNQFFLQLHSVTTDDTATYSCARMPSFITLASLSTWEGYFDFWGPGTMVTVSS

SEQ ID NO: 885 - protein, 5 aa, synthetic construct
  REGION 1..5: note = synthetic
SDYWG

SEQ ID NO: 886 - protein, 16 aa, synthetic construct
  REGION 1..16: note = synthetic
FITYSGSTSYNPSLKS

SEQ ID NO: 887 - protein, 19 aa, synthetic construct
  REGION 1..19: note = synthetic
MPSFITLASLSTWEGYFDF

SEQ ID NO: 888 - protein, 106 aa, synthetic construct
  REGION 1..106: note = synthetic
DIQMTQSPSLLSASVGDRVTLNCKASQSIHKNLAWYQQKLGEAPKFLIYYANSLQTGIPSRFSGSGSGTDFTLTISGLQPEDVATYFCQQYYSGWTFGGGTKVELK

SEQ ID NO: 889 - protein, 11 aa, synthetic construct
  REGION 1..11: note = synthetic
KASQSIHKNLA

SEQ ID NO: 890 - protein, 7 aa, synthetic construct
  REGION 1..7: note = synthetic
YANSLQT

SEQ ID NO: 891 - protein, 8 aa, synthetic construct
  REGION 1..8: note = synthetic
QQYYSGWT

SEQ ID NO: 892 - protein, 127 aa, synthetic construct
  REGION 1..127: note = synthetic
EVQLQESGPGLVKPSETLSLTCTVSGGSISSDYWGWIRQPPGKGLEWIGFITYSGSTSYNPSLKSRVTISVDTSKNQFSLKLSSVTAADTAVYYCARMPSFITLASLSTWEGYFDFWGQGTMVTVSS

SEQ ID NO: 893 - protein, 4 aa, synthetic construct
  REGION 1..4: note = synthetic
DYWG

SEQ ID NO: 894 - protein, 16 aa, synthetic construct
  REGION 1..16: note = synthetic
FITYSGSTSYNPSLKS

SEQ ID NO: 895 - protein, 19 aa, synthetic construct
  REGION 1..19: note = synthetic
MPSFITLASLSTWEGYFDF

SEQ ID NO: 896 - protein, 127 aa, synthetic construct
  REGION 1..127: note = synthetic
EVQLQESGPGLVKPSETLSLTCTVSGGSISSDYWGWIRQPPGKGLEWIGFITYSGSTSYNPSLKSRVTISRDTSKNQFSLKLSSVTAADTAVYYCARMPSFITLASLSTWEGYFDFWGQGTMVTVSS

SEQ ID NO: 897 - protein, 5 aa, synthetic construct
  REGION 1..5: note = synthetic
SDYWG

SEQ ID NO: 898 - protein, 16 aa, synthetic construct
  REGION 1..16: note = synthetic
FITYSGSTSYNPSLKS

SEQ ID NO: 899 - protein, 19 aa, synthetic construct
  REGION 1..19: note = synthetic
MPSFITLASLSTWEGYFDF

SEQ ID NO: 900 - protein, 127 aa, synthetic construct
  REGION 1..127: note = synthetic
EVQLQESGPGLVKPSETLSLTCTVSGGSISSDYWGWIRQPPGKGLEWIGFITYSGSTSYNPSLKSRITISRDTSKNQFSLKLSSVTAADTAVYYCARMPSFITLASLSTWEGYFDFWGQGTMVTVSS

SEQ ID NO: 901 - protein, 5 aa, synthetic construct
  REGION 1..5: note = synthetic
SDYWG

SEQ ID NO: 902 - protein, 16 aa, synthetic construct
  REGION 1..16: note = synthetic
FITYSGSTSYNPSLKS

SEQ ID NO: 903 - protein, 19 aa, synthetic construct
  REGION 1..19: note = synthetic
MPSFITLASLSTWEGYFDF

SEQ ID NO: 904 - protein, 127 aa, synthetic construct
  REGION 1..127: note = synthetic
EVQLQESGPGLVKPSETLSLTCTVSGSSISSDYWGWIRQPPGKGLEWMGFITYSGSTSYNPSLKSRITISRDTSKNQFSLKLSSVTAADTAVYYCARMPSFITLASLSTWEGYFDFWGQGTMVTVSS

SEQ ID NO: 905 - protein, 5 aa, synthetic construct
  REGION 1..5: note = synthetic
SDYWG

SEQ ID NO: 906 - protein, 16 aa, synthetic construct
  REGION 1..16: note = synthetic
FITYSGSTSYNPSLKS

SEQ ID NO: 907 - protein, 19 aa, synthetic construct
  REGION 1..19: note = synthetic
MPSFITLASLSTWEGYFDF

SEQ ID NO: 908 - protein, 127 aa, synthetic construct
  REGION 1..127: note = synthetic
EVQLQESGPGLVKPSETLSLTCTVSGGSISSDYWGWIRQPPGKGLEWIGFITYSGSTSYNPSLKSRVTISRDTSKNQFSLKLHSVTAADTAVYYCARMPSFITLASLSTWEGYFDFWGQGTMVTVSS

SEQ ID NO: 909 - protein, 5 aa, synthetic construct
  REGION 1..5: note = synthetic
SDYWG

SEQ ID NO: 910 - protein, 16 aa, synthetic construct
  REGION 1..16: note = synthetic
FITYSGSTSYNPSLKS

SEQ ID NO: 911 - protein, 19 aa, synthetic construct
  REGION 1..19: note = synthetic
MPSFITLASLSTWEGYFDF

SEQ ID NO: 912 - protein, 127 aa, synthetic construct
  REGION 1..127: note = synthetic
EVQLQESGPGLVKPSETLSLTCTVSGGSISSDYWGWIRQPPGKGLEWIGFITYSGSTSYNPSLKSRITISRDTSKNQFSLKLHSVTAADTAVYYCARMPSFITLASLSTWEGYFDFWGQGTMVTVSS

SEQ ID NO: 913 - protein, 5 aa, synthetic construct
  REGION 1..5: note = synthetic
SDYWG

SEQ ID NO: 914 - protein, 17 aa, synthetic construct
  REGION 1..17: note = synthetic
GFITYSGSTSYNPSLKS

SEQ ID NO: 915 - protein, 19 aa, synthetic construct
  REGION 1..19: note = synthetic
MPSFITLASLSTWEGYFDF

SEQ ID NO: 916 - protein, 127 aa, synthetic construct
  REGION 1..127: note = synthetic
EVQLQESGPGLVKPSETLSLTCTVSGSSISSDYWGWIRQPPGKGLEWIGFITYSGSTSYNPSLKSRITISRDTSKNQFSLKLHSVTAADTAVYYCARMPSFITLASLSTWEGYFDFWGQGTMVTVSS

SEQ ID NO: 917 - protein, 5 aa, synthetic construct
  REGION 1..5: note = synthetic
SDYWG

SEQ ID NO: 918 - protein, 16 aa, synthetic construct
  REGION 1..16: note = synthetic
FITYSGSTSYNPSLKS

SEQ ID NO: 919 - protein, 19 aa, synthetic construct
  REGION 1..19: note = synthetic
MPSFITLASLSTWEGYFDF

SEQ ID NO: 920 - protein, 127 aa, synthetic construct
  REGION 1..127: note = synthetic
EVQLQESGPGLVKPSETLSLTCTVSGSSISSDYWGWIRQPPGKGLEWMGFITYSGSTSYNPSLKSRITISVDTSKNQFSLKLHSVTAADTAVYYCARMPSFITLASLSTWEGYFDFWGQGTMVTVSS

SEQ ID NO: 921 - protein, 5 aa, synthetic construct
  REGION 1..5: note = synthetic
SDYWG

SEQ ID NO: 922 - protein, 16 aa, synthetic construct
  REGION 1..16: note = synthetic
FITYSGSTSYNPSLKS

SEQ ID NO: 923 - protein, 19 aa, synthetic construct
  REGION 1..19: note = synthetic
MPSFITLASLSTWEGYFDF

SEQ ID NO: 924 - protein, 127 aa, synthetic construct
  REGION 1..127: note = synthetic
EVQLQESGPGLVKPSETLSLTCAVSGYSISSDYWGWIRQPPGKGLEWIGFITYSGSTSYNPSLKSRVTISVDTSKNQFSLKLSSVTAADTAVYYCARMPSFITLASLSTWEGYFDFWGQGTMVTVSS

SEQ ID NO: 925 - protein, 5 aa, synthetic construct
  REGION 1..5: note = synthetic
SDYWG

SEQ ID NO: 926 - protein, 16 aa, synthetic construct
  REGION 1..16: note = synthetic
FITYSGSTSYNPSLKS

SEQ ID NO: 927 - protein, 19 aa, synthetic construct
  REGION 1..19: note = synthetic
MPSFITLASLSTWEGYFDF

SEQ ID NO: 928 - protein, 127 aa, synthetic construct
  REGION 1..127: note = synthetic
EVQLQESGPGLVKPSETLSLTCAVSGYSISSDYWGWIRQPPGKGLEWIGFITYSGSTSYNPSLKSRVTISRDTSKNQFSLKLSSVTAADTAVYYCARMPSFITLASLSTWEGYFDFWGQGTMVTVSS

SEQ ID NO: 929 - protein, 5 aa, synthetic construct
  REGION 1..5: note = synthetic
SDYWG

SEQ ID NO: 930 - protein, 16 aa, synthetic construct
  REGION 1..16: note = synthetic
FITYSGSTSYNPSLKS

SEQ ID NO: 931 - protein, 19 aa, synthetic construct
  REGION 1..19: note = synthetic
MPSFITLASLSTWEGYFDF

SEQ ID NO: 932 - protein, 127 aa, synthetic construct
  REGION 1..127: note = synthetic
EVQLQESGPGLVKPSETLSLTCAVSGYSISSDYWGWIRQPPGKGLEWIGFITYSGSTSYNPSLKSRITISRDTSKNQFSLKLSSVTAADTAVYYCARMPSFITLASLSTWEGYFDFWGQGTMVTVSS

SEQ ID NO: 933 - protein, 5 aa, synthetic construct
  REGION 1..5: note = synthetic
SDYWG

SEQ ID NO: 934 - protein, 16 aa, synthetic construct
  REGION 1..16: note = synthetic
FITYSGSTSYNPSLKS

SEQ ID NO: 935 - protein, 19 aa, synthetic construct
  REGION 1..19: note = synthetic
MPSFITLASLSTWEGYFDF

SEQ ID NO: 936 - protein, 127 aa, synthetic construct
  REGION 1..127: note = synthetic
EVQLQESGPGLVKPSETLSLTCAVSGSSISSDYWGWIRQPPGKGLEWMGFITYSGSTSYNPSLKSRITISRDTSKNQFSLKLSSVTAADTAVYYCARMPSFITLASLSTWEGYFDFWGQGTMVTVSS

SEQ ID NO: 937 - protein, 5 aa, synthetic construct
  REGION 1..5: note = sythetic
SDYWG

SEQ ID NO: 938 - protein, 16 aa, synthetic construct
  REGION 1..16: note = synthetic
FITYSGSTSYNPSLKS

SEQ ID NO: 939 - protein, 19 aa, synthetic construct
  REGION 1..19: note = synthetic
MPSFITLASLSTWEGYFDF

SEQ ID NO: 940 - protein, 127 aa, synthetic construct
  REGION 1..127: note = synthetic
EVQLQESGPGLVKPSETLSLTCAVSGYSISSDYWGWIRQPPGKGLEWIGFITYSGSTSYNPSLKSRVTISRDTSKNQFSLKLHSVTAADTAVYYCARMPSFITLASLSTWEGYFDFWGQGTMVTVSS

SEQ ID NO: 941 - protein, 5 aa, synthetic construct
  REGION 1..5: note = synthetic
SDYWG

SEQ ID NO: 942 - protein, 16 aa, synthetic construct
  REGION 1..16: note = synthetic
FITYSGSTSYNPSLKS

SEQ ID NO: 943 - protein, 19 aa, synthetic construct
  REGION 1..19: note = synthetic
MPSFITLASLSTWEGYFDF

SEQ ID NO: 944 - protein, 127 aa, synthetic construct
  REGION 1..127: note = synthetic
EVQLQESGPGLVKPSETLSLTCAVSGYSISSDYWGWIRQPPGKGLEWIGFITYSGSTSYNPSLKSRITISRDTSKNQFSLKLHSVTAADTAVYYCARMPSFITLASLSTWEGYFDFWGQGTMVTVSS

SEQ ID NO: 945 - protein, 5 aa, synthetic construct
  REGION 1..5: note = synthetic
SDYWG

SEQ ID NO: 946 - protein, 16 aa, synthetic construct
  REGION 1..16: note = synthetic
FITYSGSTSYNPSLKS

SEQ ID NO: 947 - protein, 19 aa, synthetic construct
  REGION 1..19: note = synthetic
MPSFITLASLSTWEGYFDF

SEQ ID NO: 948 - protein, 129 aa, synthetic construct
  REGION 1..129: note = synthetic
EVQLQESGPGLVKPSETLSLTCTVSGSSIASDYWGWIRQPPGKGLEWIGFITYSGSTSYNPSLKSRVTISVDTSKNQFSLKLSSVTAADTAVYYCARMPSFITLASLSTWEGYFDFWGQGTMVTVSSAS

SEQ ID NO: 949 - protein, 5 aa, synthetic construct
  REGION 1..5: note = synthetic
SDYWG

SEQ ID NO: 950 - protein, 16 aa, synthetic construct
  REGION 1..16: note = synthetic
FITYSGSTSYNPSLKS

SEQ ID NO: 951 - protein, 19 aa, synthetic construct
  REGION 1..19: note = synthetic
MPSFITLASLSTWEGYFDF

SEQ ID NO: 952 - protein, 127 aa, synthetic construct
  REGION 1..127: note = synthetic
EVQLQESGPGLVKPSETLSLTCTVSGSSIASDYWGWIRQPPGKGLEWIGFITYSGSTSYNPSLKSRVTISRDTSKNQFSLKLSSVTAADTAVYYCARMPSFITLASLSTWEGYFDFWGQGTMVTVSS

SEQ ID NO: 953 - protein, 5 aa, synthetic construct
  REGION 1..5: note = synthetic
SDYWG

SEQ ID NO: 954 - protein, 16 aa, synthetic construct
  REGION 1..16: note = synthetic
FITYSGSTSYNPSLKS

SEQ ID NO: 955 - protein, 19 aa, synthetic construct
  REGION 1..19: note = synthetic
MPSFITLASLSTWEGYFDF

SEQ ID NO: 956 - protein, 127 aa, synthetic construct
  REGION 1..127: note = synthetic
EVQLQESGPGLVKPSETLSLTCTVSGSSIASDYWGWIRKPPGKGLEWIGFITYSGSTSYNPSLKSRVTISRDTSKNQFSLKLSSVTAADTAVYYCARMPSFITLASLSTWEGYFDFWGQGTMVTVSS

SEQ ID NO: 957 - protein, 5 aa, synthetic construct
  REGION 1..5: note = synthetic
SDYWG

SEQ ID NO: 958 - protein, 16 aa, synthetic construct
  REGION 1..16: note = synthetic
FITYSGSTSYNPSLKS

SEQ ID NO: 959 - protein, 19 aa, synthetic construct
  REGION 1..19: note = synthetic
MPSFITLASLSTWEGYFDF

SEQ ID NO: 960 - protein, 127 aa, synthetic construct
  REGION 1..127: note = synthetic
EVQLQESGPGLVKPSETLSLTCTVSGSSIASDYWGWIRQPPGKKLEWIGFITYSGSTSYNPSLKSRVTISRDTSKNQFSLKLSSVTAADTAVYYCARMPSFITLASLSTWEGYFDFWGQGTMVTVSS

SEQ ID NO: 961 - protein, 5 aa, synthetic construct
  REGION 1..5: note = synthetic
SDYWG

SEQ ID NO: 962 - protein, 16 aa, synthetic construct
  REGION 1..16: note = synthetic
FITYSGSTSYNPSLKS

SEQ ID NO: 963 - protein, 19 aa, synthetic construct
  REGION 1..19: note = synthetic
MPSFITLASLSTWEGYFDF

SEQ ID NO: 964 - protein, 127 aa, synthetic construct
  REGION 1..127: note = synthetic
EVQLQESGPGLVKPSETLSLTCTVSGSSIASDYWGWIRQPPGKGMEWIGFITYSGSTSYNPSLKSRVTISRDTSKNQFSLKLSSVTAADTAVYYCARMPSFITLASLSTWEGYFDFWGQGTMVTVSS

SEQ ID NO: 965 - protein, 5 aa, synthetic construct
  REGION 1..5: note = synthetic
SDYWG

SEQ ID NO: 966 - protein, 16 aa, synthetic construct
  REGION 1..16: note = synthetic
FITYSGSTSYNPSLKS

SEQ ID NO: 967 - protein, 19 aa, synthetic construct
  REGION 1..19: note = synthetic
MPSFITLASLSTWEGYFDF

SEQ ID NO: 968 - protein, 127 aa, synthetic construct
  REGION 1..127: note = synthetic
EVQLQESGPGLVKPSETLSLTCTVSGSSIASDYWGWIRKPPGKKMEWIGFITYSGSTSYNPSLKSRVTISRDTSKNQFSLKLSSVTAADTAVYYCARMPSFITLASLSTWEGYFDFWGQGTMVTVSS

SEQ ID NO: 969 - protein, 5 aa, synthetic construct
  REGION 1..5: note = synthetic
SDYWG

SEQ ID NO: 970 - protein, 16 aa, synthetic construct
  REGION 1..16: note = synthetic
FITYSGSTSYNPSLKS

SEQ ID NO: 971 - protein, 19 aa, synthetic construct
  REGION 1..19: note = synthetic
MPSFITLASLSTWEGYFDF

SEQ ID NO: 972 - protein, 127 aa, synthetic construct
  REGION 1..127: note = synthetic
EVQLQESGPGLVKPSETLSLTCTVSGSSIASDYWGWIRQFPGKGLEWIGFITYSGSTSYNPSLKSRVTISRDTSKNQFSLKLSSVTADDTAVYYCARMPSFITLASLSTWEGYFDFWGQGTMVTVSS

SEQ ID NO: 973 - protein, 5 aa, synthetic construct
  REGION 1..5: note = synthetic
SDYWG

SEQ ID NO: 974 - protein, 16 aa, synthetic construct
  REGION 1..16: note = synthetic
FITYSGSTSYNPSLKS

SEQ ID NO: 975 - protein, 19 aa, synthetic construct
  REGION 1..19: note = synthetic
MPSFITLASLSTWEGYFDF

SEQ ID NO: 976 - protein, 127 aa, synthetic construct
  REGION 1..127: note = synthetic
EVQLQESGPGLVKPSETLSLTCTVSGSSIASDYWGWIRKPPGKKMEWIGFITYSGSTSYNPSLKSRVTISVDTSKNQFSLKLSSVTAADTAVYYCARMPSFITLASLSTWEGYFDFWGQGTMVTVSS

SEQ ID NO: 977 - protein, 5 aa, synthetic construct
  REGION 1..5: note = synthetic
SDYWG

SEQ ID NO: 978 - protein, 16 aa, synthetic construct
  REGION 1..16: note = synthetic
FITYSGSTSYNPSLKS

SEQ ID NO: 979 - protein, 19 aa, synthetic construct
  REGION 1..19: note = synthetic
MPSFITLASLSTWEGYFDF

SEQ ID NO: 980 - protein, 127 aa, synthetic construct
  REGION 1..127: note = synthetic
EVQLQESGPGLVKPSETLSLTCSVTGSSIASDYWGWIRQPPGKGLEWIGFITYSGSTSYNPSLKSRVTISRDTSKNQFSLKLSSVTAADTAVYYCARMPSFITLASLSTWEGYFDFWGQGTMVTVSS

SEQ ID NO: 981 - protein, 5 aa, synthetic construct
  REGION 1..5: note = synthetic
SDYWG

SEQ ID NO: 982 - protein, 16 aa, synthetic construct
  REGION 1..16: note = synthetic
FITYSGSTSYNPSLKS

SEQ ID NO: 983 - protein, 19 aa, synthetic construct
  REGION 1..19: note = synthetic
MPSFITLASLSTWEGYFDF

SEQ ID NO: 984 - protein, 127 aa, synthetic construct
  REGION 1..127: note = synthetic
EVQLQQSGAGLLKPSETLSLTCSVTGSSIASDYWGWIRQPPGKGLEWIGFITYSGSTSYNPSLKSRVTISVDTSKNQFSLKLSSVTAADTAVYYCARMPSFITLASLSTWEGYFDFWGQGTMVTVSS

SEQ ID NO: 985 - protein, 5 aa, synthetic construct
  REGION 1..5: note = synthetic
SDYWG

SEQ ID NO: 986 - protein, 16 aa, synthetic construct
  REGION 1..16: note = synthetic
FITYSGSTSYNPSLKS

SEQ ID NO: 987 - protein, 19 aa, synthetic construct
  REGION 1..19: note = synthetic
MPSFITLASLSTWEGYFDF

SEQ ID NO: 988 - protein, 127 aa, synthetic construct
  REGION 1..127: note = synthetic
EVQLQESGPGLVKPPGTLSLTCSVTGSSIASDYWGWVRQPPGKGLEWIGFITYSGSTSYNPSLKSRVTISVDTSKNQFSLKLSSVTAADTAVYYCARMPSFITLASLSTWEGYFDFWGQGTMVTVSS

SEQ ID NO: 989 - protein, 5 aa, synthetic construct
  REGION 1..5: note = synthetic
SDYWG

SEQ ID NO: 990 - protein, 16 aa, synthetic construct
  REGION 1..16: note = synthetic
FITYSGSTSYNPSLKS

SEQ ID NO: 991 - protein, 19 aa, synthetic construct
  REGION 1..19: note = synthetic
MPSFITLASLSTWEGYFDF

SEQ ID NO: 992 - protein, 127 aa, synthetic construct
  REGION 1..127: note = synthetic
EVQLQESGPGLVKPSETLSLTCAVSGSSISSDYWGWIRQPPGKGLEWIGFITYSGSTSYNPSLKSRITISRDTSKNQFSLKLHSVTAADTAVYYCARMPSFITLASLSTWEGYFDFWGQGTMVTVSS

SEQ ID NO: 993 - protein, 5 aa, synthetic construct
  REGION 1..5: note = synthetic
SDYWG

SEQ ID NO: 994 - protein, 16 aa, synthetic construct
  REGION 1..16: note = synthetic
FITYSGSTSYNPSLKS

SEQ ID NO: 995 - protein, 19 aa, synthetic construct
  REGION 1..19: note = synthetic
MPSFITLASLSTWEGYFDF

SEQ ID NO: 996 - protein, 127 aa, synthetic construct
  REGION 1..127: note = synthetic
EVQLQESGPGLVKPSETLSLTCAVSGSSISSDYWGWIRQPPGKGLEWMGFITYSGSTSYNPSLKSRITISRDTSKNQFSLKLHSVTAADTAVYYCARMPSFITLASLSTWEGYFDFWGQGTMVTVSS

SEQ ID NO: 997 - protein, 5 aa, synthetic construct
  REGION 1..5: note = synthetic
SDYWG

SEQ ID NO: 998 - protein, 16 aa, synthetic construct
  REGION 1..16: note = synthetic
FITYSGSTSYNPSLKS

SEQ ID NO: 999 - protein, 19 aa, synthetic construct
  REGION 1..19: note = synthetic
MPSFITLASLSTWEGYFDF

SEQ ID NO: 1000 - protein, 106 aa, synthetic construct
  REGION 1..106: note = synthentic
DIQMTQSPSSLSASVGDRVTITCKASQSIHKNLAWYQQKPGKAPKLLIYYANSLQTGVPSRFSGSGSGTDFTLTISSLQPEDFATYYCQQYYSGWTFGGGTKVEIK

SEQ ID NO: 1001 - protein, 12 aa, synthetic construct
  REGION 1..12: note = synthetic
KASQSIHKNLAW

SEQ ID NO: 1002 - protein, 7 aa, synthetic construct
  REGION 1..7: note = synthetic
YANSLQT

SEQ ID NO: 1003 - protein, 8 aa, synthetic construct
  REGION 1..8: note = synthetic
QQYYSGWT

SEQ ID NO: 1004 - protein, 106 aa, synthetic construct
  REGION 1..106: note = synthetic
DIQMTQSPSSLSASVGDRVTITCKASQSIHKNLAWYQQKPGKAPKFLIYYANSLQTGVPSRFSGSGSGTDFTLTISSLQPEDFATYYCQQYYSGWTFGGGTKVEIK

SEQ ID NO: 1005 - protein, 12 aa, synthetic construct
  REGION 1..12: note = synthetic
KASQSIHKNLAW

SEQ ID NO: 1006 - protein, 7 aa, synthetic construct
  REGION 1..7: note = synthetic
YANSLQT

SEQ ID NO: 1007 - protein, 8 aa, synthetic construct
  REGION 1..8: note = synthetic
QQYYSGWT

SEQ ID NO: 1008 - protein, 106 aa, synthetic construct
  REGION 1..106: note = synthetic
DIQMTQSPSSLSASVGDRVTITCKASQSIHKNLAWYQQKPGKAPKFLIYYANSLQTGIPSRFSGSGSGTDFTLTISSLQPEDFATYYCQQYYSGWTFGGGTKVEIK

SEQ ID NO: 1009 - protein, 12 aa, synthetic construct
  REGION 1..12: note = synthetic
KASQSIHKNLAW

SEQ ID NO: 1010 - protein, 7 aa, synthetic construct
  REGION 1..7: note = synthetic
YANSLQT

SEQ ID NO: 1011 - protein, 8 aa, synthetic construct
  REGION 1..8: note = synthetic
QQYYSGWT

SEQ ID NO: 1012 - protein, 106 aa, synthetic construct
  REGION 1..106: note = synthetic
DIQMTQSPSSLSASVGDRVTITCKASQSIHKNLAWYQQKPGKVPKLLIYYANSLQTGVPSRFSGSGSGTDFTLTISSLQPEDVATYYCQQYYSGWTFGGGTKVEIK

SEQ ID NO: 1013 - protein, 12 aa, synthetic construct
  REGION 1..12: note = synthetic
KASQSIHKNLAW

SEQ ID NO: 1014 - protein, 7 aa, synthetic construct
  REGION 1..7: note = synthetic
YANSLQT

SEQ ID NO: 1015 - protein, 8 aa, synthetic construct
  REGION 1..8: note = synthetic
QQYYSGWT

SEQ ID NO: 1016 - protein, 106 aa, synthetic construct
  REGION 1..106: note = synthetic
DIQMTQSPSSLSASVGDRVTITCKASQSIHKNLAWYQQKPGKVPKFLIYYANSLQTGVPSRFSGSGSGTDFTLTISSLQPEDVATYYCQQYYSGWTFGGGTKVEIK

SEQ ID NO: 1017 - protein, 12 aa, synthetic construct
  REGION 1..12: note = synthetic
KASQSIHKNLAW

SEQ ID NO: 1018 - protein, 7 aa, synthetic construct
  REGION 1..7: note = synthetic
YANSLQT

SEQ ID NO: 1019 - protein, 8 aa, synthetic construct
  REGION 1..8: note = synthetic
QQYYSGWT

SEQ ID NO: 1020 - protein, 106 aa, synthetic construct
  REGION 1..106: note = synthetic
DIQMTQSPSSLSASVGDRVTITCKASQSIHKNLAWYQQKPGKVPKFLIYYANSLQTGIPSRFSGSGSGTDFTLTISSLQPEDVATYYCQQYYSGWTFGGGTKVEIK

SEQ ID NO: 1021 - protein, 12 aa, synthetic construct
  REGION 1..12: note = synthetic
KASQSIHKNLAW

SEQ ID NO: 1022 - protein, 7 aa, synthetic construct
  REGION 1..7: note = synthetic
YANSLQT

SEQ ID NO: 1023 - protein, 8 aa, synthetic construct
  REGION 1..8: note = sythetic
QQYYSGWT

SEQ ID NO: 1024 - protein, 106 aa, synthetic construct; identical to SEQ ID NO: 1000
  REGION 1..106: note = synthetic

SEQ ID NO: 1025 - protein, 12 aa, synthetic construct
  REGION 1..12: note = synthetic
KASQSIHKNLAW

SEQ ID NO: 1026 - protein, 7 aa, synthetic construct
  REGION 1..7: note = synthetic
YANSLQT

SEQ ID NO: 1027 - protein, 8 aa, synthetic construct
  REGION 1..8: note = synthetic
QQYYSGWT

SEQ ID NO: 1028 - protein, 106 aa, synthetic construct; identical to SEQ ID NO: 1004
  REGION 1..106: note = synthetic

SEQ ID NO: 1029 - protein, 12 aa, synthetic construct
  REGION 1..12: note = synthetic
KASQSIHKNLAW

SEQ ID NO: 1030 - protein, 7 aa, synthetic construct
  REGION 1..7: note = synthetic
YANSLQT

SEQ ID NO: 1031 - protein, 8 aa, synthetic construct
  REGION 1..8: note = synthetic
QQYYSGWT

SEQ ID NO: 1032 - protein, 106 aa, synthetic construct
  REGION 1..106: note = synthetic
DIQMTQSPSSLSASVGDRVTITCKASQSIHKNLAWYQQKPGKAPKLLIYYANSLQTGVPSRFSGSGSGTDFTLTISSLQPEDFATYFCQQYYSGWTFGGGTKVEIK

SEQ ID NO: 1033 - protein, 12 aa, synthetic construct
  REGION 1..12: note = synthetic
KASQSIHKNLAW

SEQ ID NO: 1034 - protein, 7 aa, synthetic construct
  REGION 1..7: note = synthetic
YANSLQT

SEQ ID NO: 1035 - protein, 8 aa, synthetic construct
  REGION 1..8: note = synthetic
QQYYSGWT

SEQ ID NO: 1036 - protein, 106 aa, synthetic construct
  REGION 1..106: note = synthetic
DIQMTQSPSSLSASVGDRVTITCKASQSIHKNLAWYQQKPGKAPKFLIYYANSLQTGVPSRFSGSGSGTDFTLTISSLQPEDFATYFCQQYYSGWTFGGGTKVEIK

SEQ ID NO: 1037 - protein, 12 aa, synthetic construct
  REGION 1..12: note = synthetic
KASQSIHKNLAW

SEQ ID NO: 1038 - protein, 7 aa, synthetic construct
  REGION 1..7: note = synthetic
YANSLQT

SEQ ID NO: 1039 - protein, 8 aa, synthetic construct
  REGION 1..8: note = synthetic
QQYYSGWT

SEQ ID NO: 1040 - protein, 106 aa, synthetic construct
  REGION 1..106: note = synthetic
DIQMTQSPSSLSASVGDRVTITCKASQSIHKNLAWYQQKPGKAPKLLIYYANSLQTGIPSRFSGSGSGTDFTLTISSLQPEDFATYYCQQYYSGWTFGGGTKVEIK

SEQ ID NO: 1041 - protein, 12 aa, synthetic construct
  REGION 1..12: note = synthetic
KASQSIHKNLAW

SEQ ID NO: 1042 - protein, 7 aa, synthetic construct
  REGION 1..7: note = synthetic
YANSLQT

SEQ ID NO: 1043 - protein, 8 aa, synthetic construct
  REGION 1..8: note = synthetic
QQYYSGWT

SEQ ID NO: 1044 - protein, 121 aa, synthetic construct
  REGION 1..121: note = synthetic
DVQLQESGPGLVKPSQSLSLTCTVTGYSITSDYAWNWIRQFPGNKLEWMGYISNSGSASYNPSLKSRISITRDTSKNQFFLQLNSVTTEDTATYYCATLIYYDYGGAMNFWGQGTSVTVSS

SEQ ID NO: 1045 - protein, 11 aa, synthetic construct
  REGION 1..11: note = synthetic
GYSITSDYAWN

SEQ ID NO: 1046 - protein, 16 aa, synthetic construct
  REGION 1..16: note = synthetic
YISNSGSASYNPSLKS

SEQ ID NO: 1047 - protein, 12 aa, synthetic construct
  REGION 1..12: note = synthetic
LIYYDYGGAMNF

SEQ ID NO: 1048 - protein, 107 aa, synthetic construct
  REGION 1..107: note = synthetic
DIVMTQSHKFMSTSVGDRVSITCKASQGVSTTVAWYQQKPGQSPKLLIYSASYRYTGVPDRFTGSGSGTDFTFTISSVQSEDLAVYYCQHYYSTPWTFGGGTKLEIK

SEQ ID NO: 1049 - protein, 11 aa, synthetic construct
  REGION 1..11: note = synthetic
KASQGVSTTVA

SEQ ID NO: 1050 - protein, 7 aa, synthetic construct
  REGION 1..7: note = synthetic
SASYRYT

SEQ ID NO: 1051 - protein, 9 aa, synthetic construct
  REGION 1..9: note = synthetic
QHYYSTPWT

SEQ ID NO: 1052 - protein, 7 aa, synthetic construct
  REGION 1..7: note = synthetic
YASNLQT

SEQ ID NO: 1053 - protein, 7 aa, synthetic construct
  REGION 1..7: note = synthetic
YASSLQT

SEQ ID NO: 1054 - protein, 7 aa, synthetic construct
  REGION 1..7: note = synthetic
YASTLQT

SEQ ID NO: 1055 - protein, 7 aa, synthetic construct
  REGION 1..7: note = synthetic
YATTLQT

SEQ ID NO: 1056 - protein, 7 aa, synthetic construct
  REGION 1..7: note = synthetic
YASYLQT

SEQ ID NO: 1057 - protein, 7 aa, synthetic construct
  REGION 1..7: note = synthetic
YANQLQT

SEQ ID NO: 1058 - protein, 7 aa, synthetic construct
  REGION 1..7: note = synthetic
YAGSLQT

SEQ ID NO: 1059 - protein, 7 aa, synthetic construct
  REGION 1..7: note = synthetic
YASQLQT

SEQ ID NO: 1060 - protein, 7 aa, synthetic construct
  REGION 1..7: note = synthetic
YADSLQT

SEQ ID NO: 1061 - protein, 107 aa, synthetic construct; identical to SEQ ID NO: 1048
  REGION 1..107: note = synthetic

SEQ ID NO: 1062 - protein, 11 aa, synthetic construct
  REGION 1..11: note = synthetic
KASQGVSTTVA

SEQ ID NO: 1063 - protein, 7 aa, synthetic construct
  REGION 1..7: note = synthetic
SASYRYT

SEQ ID NO: 1064 - protein, 9 aa, synthetic construct
  REGION 1..9: note = synthetic
QHYYSTPWT

SEQ ID NO: 1065 - protein, 8 aa, synthetic construct
  REGION 1..8: note = synthetic
QQYYSGFT

SEQ ID NO: 1066 - protein, 8 aa, synthetic construct
  REGION 1..8: note = synthetic
QQYYSGYT

SEQ ID NO: 1067 - protein, 8 aa, synthetic construct
  REGION 1..8: note = synthetic
QQYYSGIT

SEQ ID NO: 1068 - protein, 8 aa, synthetic construct
  REGION 1..8: note = synthetic
QQYYSGVT

SEQ ID NO: 1069 - protein, 8 aa, synthetic construct
  REGION 1..8: note = synthetic
QQYYSGLT

SEQ ID NO: 1070 - protein, 121 aa, synthetic construct; identical to SEQ ID NO: 1044
  REGION 1..121: note = synthetic

SEQ ID NO: 1071 - protein, 11 aa, synthetic construct
  REGION 1..11: note = synthetic
GYSITSDYAWN

SEQ ID NO: 1072 - protein, 16 aa, synthetic construct
  REGION 1..16: note = synthetic
YISNSGSASYNPSLKS

SEQ ID NO: 1073 - protein, 12 aa, synthetic construct
  REGION 1..12: note = synthetic
LIYYDYGGAMNF

SEQ ID NO: 1074 - protein, 19 aa, synthetic construct
  REGION 1..19: note = synthetic
MPSFITLASLSTFEGYFDF

SEQ ID NO: 1075 - protein, 19 aa, synthetic construct
  REGION 1..19: note = synthetic
MPSFITLASLSTYEGYFDF

SEQ ID NO: 1076 - protein, 19 aa, synthetic construct
  REGION 1..19: note = synthetic
MPSFITLASLSTIEGYFDF

SEQ ID NO: 1077 - protein, 19 aa, synthetic construct
  REGION 1..19: note = synthetic
MPSFITLASLSTVEGYFDF

SEQ ID NO: 1078 - protein, 19 aa, synthetic construct
  REGION 1..19: note = synthetic
MPSFITLASLSTLEGYFDF

SEQ ID NO: 1079 - protein, 119 aa, synthetic construct; identical to SEQ ID NO: 410
  REGION 1..119: note = synthetic

SEQ ID NO: 1080 - protein, 5 aa, synthetic construct
  REGION 1..5: note = synthetic
SYVMH

SEQ ID NO: 1081 - protein, 16 aa, synthetic construct
  REGION 1..16: note = synthetic
YIDPYNDGAKYNEKFK

SEQ ID NO: 1082 - protein, 9 aa, synthetic construct
  REGION 1..9: note = synthetic
GPYGWYFDV

SEQ ID NO: 1083 - protein, 16 aa, synthetic construct
  REGION 1..16: note = synthetic
YIDPYNRGAKYNEKFG

SEQ ID NO: 1084 - protein, 16 aa, synthetic construct
  REGION 1..16: note = synthetic
YIDPYNLGAKYNEKFG

SEQ ID NO: 1085 - protein, 16 aa, synthetic construct
  REGION 1..16: note = synthetic
YIDPYNKGAKYNEKFG

SEQ ID NO: 1086 - protein, 16 aa, synthetic construct
  REGION 1..16: note = synthetic
YIDPYNFGAKYNEKFG

SEQ ID NO: 1087 - protein, 16 aa, synthetic construct
  REGION 1..16: note = synthetic
YIDPYNSGAKYNEKFG

SEQ ID NO: 1088 - protein, 16 aa, synthetic construct
  REGION 1..16: note = synthetic
YIDPYNYGAKYNEKFG

SEQ ID NO: 1089 - protein, 16 aa, synthetic construct
  REGION 1..16: note = synthetic
YIDPYNVGAKYNEKFG

SEQ ID NO: 1090 - protein, 17 aa, synthetic construct
  REGION 1..17: note = synthetic
YIDPYNDRAKYNEKFKG

SEQ ID NO: 1091 - protein, 17 aa, synthetic construct
  REGION 1..17: note = synthetic
YIDPYNDNAKYNEKFKG

SEQ ID NO: 1092 - protein, 17 aa, synthetic construct
  REGION 1..17: note = synthetic
YIDPYNDQAKYNEKFKG

SEQ ID NO: 1093 - protein, 17 aa, synthetic construct
  REGION 1..17: note = synthetic
YIDPYNDEAKYNEKFKG

SEQ ID NO: 1094 - protein, 17 aa, synthetic construct
  REGION 1..17: note = synthetic
YIDPYNDLAKYNEKFKG

SEQ ID NO: 1095 - protein, 17 aa, synthetic construct
  REGION 1..17: note = synthetic
YIDPYNDKAKYNEKFKG

SEQ ID NO: 1096 - protein, 17 aa, synthetic construct
  REGION 1..17: note = synthetic
YIDPYNDSAKYNEKFKG

SEQ ID NO: 1097 - protein, 17 aa, synthetic construct
  REGION 1..17: note = synthetic
YIDPYNDYAKYNEKFKG

SEQ ID NO: 1098 - protein, 17 aa, synthetic construct
  REGION 1..17: note = synthetic
YIDPYNDVAKYNEKFKG

SEQ ID NO: 1099 - protein, 107 aa, synthetic construct; identical to SEQ ID NO: 415
  REGION 1..107: note = synthetic

SEQ ID NO: 1100 - protein, 11 aa, synthetic construct
  REGION 1..11: note = synthetic
RASEHIYSYLS

SEQ ID NO: 1101 - protein, 7 aa, synthetic construct
  REGION 1..7: note = synthetic
NAKTLAE

SEQ ID NO: 1102 - protein, 9 aa, synthetic construct
  REGION 1..9: note = synthetic
QHHFGSPLT

SEQ ID NO: 1103 - protein, 7 aa, synthetic construct
  REGION 1..7: note = synthetic
AAKTLAE

SEQ ID NO: 1104 - protein, 7 aa, synthetic construct
  REGION 1..7: note = synthetic
YAKTLAE

SEQ ID NO: 1105 - protein, 7 aa, synthetic construct
  REGION 1..7: note = synthetic
WAKTLAE

SEQ ID NO: 1106 - protein, 7 aa, synthetic construct
  REGION 1..7: note = synthetic
SAKTLAE

SEQ ID NO: 1107 - protein, 7 aa, synthetic construct
  REGION 1..7: note = synthetic
TAKTLAE

SEQ ID NO: 1108 - protein, 7 aa, synthetic construct
  REGION 1..7: note = synthetic
IAKTLAE

SEQ ID NO: 1109 - protein, 7 aa, synthetic construct
  REGION 1..7: note = synthetic
VAKTLAE

SEQ ID NO: 1110 - protein, 7 aa, synthetic construct
  REGION 1..7: note = synthetic
NNKTLAE

SEQ ID NO: 1111 - protein, 7 aa, synthetic construct
  REGION 1..7: note = synthetic
NIKTLAE

SEQ ID NO: 1112 - protein, 7 aa, synthetic construct
  REGION 1..7: note = synthetic
NLLTLAE

SEQ ID NO: 1113 - protein, 7 aa, synthetic construct
  REGION 1..7: note = synthetic
NTKTLAE

SEQ ID NO: 1114 - protein, 7 aa, synthetic construct
  REGION 1..7: note = synthetic
NVKTLAE

SEQ ID NO: 1115 - protein, 119 aa, synthetic construct
  REGION 1..119: note = synthetic
EVQLVQSGAEVKKPGASVKVSCKASGYTFSSYVMHWVRQAPGQRLEWIGYIDPYNDGAKYSQKFQGRVTLTRDTSASTAYMELSSLRSEDTAVYYCARGGPYGWYFDVWGQGTTVTVSS

SEQ ID NO: 1116 - protein, 6 aa, synthetic construct
  REGION 1..6: note = synthetic
SYVMHW

SEQ ID NO: 1117 - protein, 16 aa, synthetic construct
  REGION 1..16: note = synthetic
YIDPYNDGAKYSQKFQ

SEQ ID NO: 1118 - protein, 10 aa, synthetic construct
  REGION 1..10: note = synthetic
GGPYGWYFDV

SEQ ID NO: 1119 - protein, 119 aa, synthetic construct
  REGION 1..119: note = synthetic
EVQLVQSGAEVKKPGASVKVSCKASGYTFSSYVMHWVRQAPGQRLEWIGYIDPYNDGAKYSQKFQGRVTLTSDKSASTAYMELSSLRSEDTAVYYCARGGPYGWYFDVWGQGTTVTVSS

SEQ ID NO: 1120 - protein, 5 aa, synthetic construct
  REGION 1..5: note = synthetic
SYVMH

SEQ ID NO: 1121 - protein, 16 aa, synthetic construct
  REGION 1..16: note = synthetic
YIDPYNDGAKYSQKFQ

SEQ ID NO: 1122 - protein, 10 aa, synthetic construct
  REGION 1..10: note = synthetic
GGPYGWYFDV

SEQ ID NO: 1123 - protein, 119 aa, synthetic construct
  REGION 1..119: note = synthetic
EVQLVQSGAEVKKPGASVKVSCKASGYTFSSYVMHWVRQAPGQGLEWIGYIDPYNDGAKYAQKFQGRVTLTRDTSTSTVYMELSSLRSEDTAVYYCARGGPYGWYFDVWGQGTTVTVSS

SEQ ID NO: 1124 - protein, 5 aa, synthetic construct
  REGION 1..5: note = synthetic
SYVMH

SEQ ID NO: 1125 - protein, 13 aa, synthetic construct
  REGION 1..13: note = synthetic
YIDPYNDGAKYAQ

SEQ ID NO: 1126 - protein, 10 aa, synthetic construct
  REGION 1..10: note = synthetic
GGPYGWYFDV

SEQ ID NO: 1127 - protein, 119 aa, synthetic construct
  REGION 1..119: note = synthetic
EVQLVQSGAEVKKPGASVKVSCKASGYTFSSYVMHWVRQAPGQGLEWIGYIDPYNDGAKYAQKFQGRVTLTSDKSTSTVYMELSSLRSEDTAVYYCARGGPYGWYFDVWGQGTTVTVSS

SEQ ID NO: 1128 - protein, 5 aa, synthetic construct
  REGION 1..5: note = synthetic
SYVMH

SEQ ID NO: 1129 - protein, 16 aa, synthetic construct
  REGION 1..16: note = synthetic
YIDPYNDGAKYAQKFQ

SEQ ID NO: 1130 - protein, 10 aa, synthetic construct
  REGION 1..10: note = synthetic
GGPYGWYFDV

SEQ ID NO: 1131 - protein, 119 aa, synthetic construct
  REGION 1..119: note = synthetic
EVQLVQSGAEVKKPGSSVKVSCKASGYTFSSYVMHWVRQAPGQGLEWIGYIDPYNDGAKYAQKFQGRVTLTSDKSTSTAYMELSSLRSEDTAVYYCARGGPYGWYFDVWGQGTTVTVSS

SEQ ID NO: 1132 - protein, 5 aa, synthetic construct
  REGION 1..5: note = synthetic
SYVMH

SEQ ID NO: 1133 - protein, 16 aa, synthetic construct
  REGION 1..16: note = synthetic
YIDPYNDGAKYAQKFQ

SEQ ID NO: 1134 - protein, 10 aa, synthetic construct
  REGION 1..10: note = synthetic
GGPYGWYFDV

SEQ ID NO: 1135 - protein, 119 aa, synthetic construct
  REGION 1..119: note = synthetic
EVQLVQSGAEVKKPGASVKVSCKASGYTFSSYVMHWVRQAPGQGLEWIGYIDPYNDGAKYAQKFQGRVTLTSDKSISTAYMELSRLRSDDTVVYYCARGGPYGWYFDVWGQGTTVTVSS

SEQ ID NO: 1136 - protein, 5 aa, synthetic construct
  REGION 1..5: note = synthetic
SYVMH

SEQ ID NO: 1137 - protein, 16 aa, synthetic construct
  REGION 1..16: note = synthetic
YIDPYNDGAKYAQKFQ

SEQ ID NO: 1138 - protein, 10 aa, synthetic construct
  REGION 1..10: note = synthetic
GGPYGWYFDV

SEQ ID NO: 1139 - protein, 107 aa, synthetic construct
  REGION 1..107: note = synthetic
DIQMTQSPSSLSASVGDRVTITCRASEHIYSYLSWYQQKPGKAPKLLIYNAKTLAEGVPSRFSGSGSGTDFTLTISSLQPEDFATYYCQHHFGSPLTFGQGTRLEIK

SEQ ID NO: 1140 - protein, 11 aa, synthetic construct
  REGION 1..11: note = synthetic
RASEHIYSYLS

SEQ ID NO: 1141 - protein, 7 aa, synthetic construct
  REGION 1..7: note = synthetic
NAKTLAE

SEQ ID NO: 1142 - protein, 9 aa, synthetic construct
  REGION 1..9: note = synthetic
QHHFGSPLT

SEQ ID NO: 1143 - protein, 107 aa, synthetic construct
  REGION 1..107: note = synthetic
DIQMTQSPSSLSASVGDRVTITCRASEHIYSYLSWYQQKPGKAPKLLIYNAKTLAEGVPSRFSGSGSGTQFTLTISSLQPEDFATYYCQHHFGSPLTFGQGTRLEIK

SEQ ID NO: 1144 - protein, 11 aa, synthetic construct
  REGION 1..11: note = synthetic
RASEHIYSYLS

SEQ ID NO: 1145 - protein, 7 aa, synthetic construct
  REGION 1..7: note = synthetic
NAKTLAE

SEQ ID NO: 1146 - protein, 9 aa, synthetic construct
  REGION 1..9: note = synthetic
QHHFGSPLT

SEQ ID NO: 1147 - protein, 107 aa, synthetic construct
  REGION 1..107: note = synthetic
DIQMTQSPSSLSASVGDRVTITCRASEHIYSYLSWYQQKPGKVPKLLIYNAKTLAEGVPSRFSGSGSGTDFTLTISSLQPEDVATYYCQHHFGSPLTFGQGTRLEIK

SEQ ID NO: 1148 - protein, 11 aa, synthetic construct
  REGION 1..11: note = synthetic
RASEHIYSYLS

SEQ ID NO: 1149 - protein, 7 aa, synthetic construct
  REGION 1..7: note = synthetic
NAKTLAE

SEQ ID NO: 1150 - protein, 9 aa, synthetic construct
  REGION 1..9: note = synthetic
QHHFGSPLT

SEQ ID NO: 1151 - protein, 107 aa, synthetic construct
  REGION 1..107: note = synthetic
DIQMTQSPSSLSASVGDRVTITCRASEHIYSYLSWYQQKPGKVPKLLIYNAKTLAEGVPSRFSGSGSGTQFTLTISSLQPEDVATYYCQHHFGSPLTFGQGTRLEIK

SEQ ID NO: 1152 - protein, 11 aa, synthetic construct
  REGION 1..11: note = synthetic
RASEHIYSYLS

SEQ ID NO: 1153 - protein, 7 aa, synthetic construct
  REGION 1..7: note = synthetic
NAKTLAE

SEQ ID NO: 1154 - protein, 9 aa, synthetic construct
  REGION 1..9: note = synthetic
QHHFGSPLT

SEQ ID NO: 1155 - protein, 119 aa, synthetic construct; identical to SEQ ID NO: 1135
  REGION 1..119: note = synthetic

SEQ ID NO: 1156 - protein, 17 aa, synthetic construct
  REGION 1..17: note = synthetic
YIDPYNDGAKYAQKFQG

SEQ ID NO: 1157 - protein, 17 aa, synthetic construct
  REGION 1..17: note = synthetic
YIDPYNDGAKYSQKFQG

SEQ ID NO: 1158 - protein, 119 aa, synthetic construct; identical to SEQ ID NO: 1135
  REGION 1..119: note = synthetic

SEQ ID NO: 1159 - protein, 10 aa, synthetic construct
  REGION 1..10: note = synthetic
GGPYGAYFDV

SEQ ID NO: 1160 - protein, 10 aa, synthetic construct
  REGION 1..10: note = synthetic
GGPYGDYFDV

SEQ ID NO: 1161 - protein, 10 aa, synthetic construct
  REGION 1..10: note = synthetic
GGPYGEYFDV

SEQ ID NO: 1162 - protein, 10 aa, synthetic construct
  REGION 1..10: note = synthetic
GGPYGFYFDV

SEQ ID NO: 1163 - protein, 10 aa, synthetic construct
  REGION 1..10: note = synthetic
GGPYGGYFDV

SEQ ID NO: 1164 - protein, 10 aa, synthetic construct
  REGION 1..10: note = synthetic
GGPYGIYFDV

SEQ ID NO: 1165 - protein, 10 aa, synthetic construct
  REGION 1..10: note = synthetic
GGPYGKYFDV

SEQ ID NO: 1166 - protein, 10 aa, synthetic construct
  REGION 1..10: note = synthetic
GGPYGNYFDV

SEQ ID NO: 1167 - protein, 10 aa, synthetic construct
  REGION 1..10: note = synthetic
GGPYGQYFDV

SEQ ID NO: 1168 - protein, 10 aa, synthetic construct
  REGION 1..10: note = synthetic
GGPYGRYFDV

SEQ ID NO: 1169 - protein, 10 aa, synthetic construct
  REGION 1..10: note = synthetic
GGPYGSYFDV

SEQ ID NO: 1170 - protein, 10 aa, synthetic construct
  REGION 1..10: note = synthetic
GGPYGTYFDV

SEQ ID NO: 1171 - protein, 10 aa, synthetic construct
  REGION 1..10: note = synthetic
GGPYGVYFDV

SEQ ID NO: 1172 - protein, 10 aa, synthetic construct
  REGION 1..10: note = synthetic
GGPYGYYFDV

SEQ ID NO: 1173 - protein, 116 aa, synthetic construct
  REGION 1..116: note = synthetic
QVQLMESGPGLVQPSQTLSLTCTVSGFPLTSYTVHWVRQPPGKGLEWIGAIWSSGSTDYNSALKSRLNINRDSSKSQVFLKMNSLQTEDTAIYFCTKSGWAFFDYWGQGVMVTVSS

SEQ ID NO: 1174 - protein, 106 aa, synthetic construct
  REGION 1..106: note = synthetic
DIQMTQSPSLLSASVGDRVTLNCIASQNIYKSLAWYQLKLGEAPKLLIYNANSLQAGIPSRFSGSGSGTDFALTISGLQPEDVATYFCQQYSGGYTFGAGTKLELK

SEQ ID NO: 1175 - protein, 119 aa, synthetic construct
  REGION 1..119: note = synthetic
EVQLVESGGDLVQPGRSLKISCVASGFTFSDYYMAWVRLAPQKGLEWVASISYEGSRTHYGDSVRGRFIISRDNPKNILYLQMNSLGSEDTATYFCARHTGTLDWLVYWGQGTLVIVSS

SEQ ID NO: 1176 - protein, 106 aa, synthetic construct
  REGION 1..106: note = synthetic
NIVMAQSPKSMSISAGDRVTMNCKASQNVDNNIAWYQQKPGQSPKLLIFYASNRYSGVPDRFTGGGYGTDFTLTIKSVQAEDAAFYYCQRIYNFPTFGSGTKLEIK

SEQ ID NO: 1177 - protein, 119 aa, synthetic construct
  REGION 1..119: note = synthetic
EVQLVESGGGLVQPGGSLRLSCAASGFTFSSYIMSWVRQAPGKGLEWVATISGGSKGQYYADSVKGRFTISRDNSKNTLYLQMNSLRAEDTAVYYCAKWLLSYYAMDYWGQGTLVTVSS

SEQ ID NO: 1178 - protein, 8 aa, synthetic construct
  REGION 1..8: note = synthetic
GFTFSSYI

SEQ ID NO: 1179 - protein, 8 aa, synthetic construct
  REGION 1..8: note = synthetic
ISGGSKGQ

SEQ ID NO: 1180 - protein, 12 aa, synthetic construct
  REGION 1..12: note = synthetic
AKWLLSYYAMDY

SEQ ID NO: 1181 - protein, 107 aa, synthetic construct
  REGION 1..107: note = synthetic
DIQMTQSPSSLSASVGDRITITCRASQSMAIWLSWYQQKPGKAPKLLIYKASKSHTGVPSRFSGSGSGTDFTLTISSLQPEDFATYYCQQGQSYPYTFGQGTKLEIK

SEQ ID NO: 1182 - protein, 6 aa, synthetic construct
  REGION 1..6: note = synthetic
QSMAIW

SEQ ID NO: 1183 - skipped

SEQ ID NO: 1184 - protein, 9 aa, synthetic construct
  REGION 1..9: note = synthetic
QQGQSYPYT

SEQ ID NO: 1185 - protein, 330 aa, synthetic construct
  REGION 1..330: note = synthetic
ASTKGPSVFPLAPSSKSTSGGTAALGCLVKDYFPEPVTVSWNSGALTSGVHTFPAVLQSSGLYSLSSVVTVPSSSLGTQTYICNVNHKPSNTKVDKKVEPKSCDKTHTCPPCPAPELLGGPSVFLFPPKPKDTLMISRTPEVTCVVVDVSHEDPEVKFNWYVDGVEVHNAKTKPREEQYNSTYRVVSVLTVLHQDWLNGKEYKCKVSNKALPAPIEKTISKAKGQPREPQVYTLPPSREEMTKNQVSLTCLVKGFYPSDIAVEWESNGQPENNYKTTPPVLDSDGSFFLYSKLTVDKSRWQQGNVFSCSVMHEALHNHYTQKSLSLSPGK

SEQ ID NO: 1186 - protein, 330 aa, synthetic construct
  REGION 1..330: note = synthetic
ASTKGPSVFPLAPSSKSTSGGTAALGCLVKDYFPEPVTVSWNSGALTSGVHTFPAVLQSSGLYSLSSVVTVPSSSLGTQTYICNVNHKPSNTKVDKKVEPKSCDKTHTCPPCPAPELLGGPSVFLFPPKPKDTLMISRTPEVTCVVVAVSHEDPEVKFNWYVDGVEVHNAKTKPREEQYNSTYRVVSVLTVLHQDWLNGKEYKCKVSNKALPAPIEKTISKAKGQPREPQVYTLPPSREEMTKNQVSLTCLVKGFYPSDIAVEWESNGQPENNYKTTPPVLDSDGSFFLYSKLTVDKSRWQQGNVFSCSVMHEALHNHYTQKSLSLSPGK

SEQ ID NO: 1187 - protein, 330 aa, synthetic construct
  REGION 1..330: note = synthetic
ASTKGPSVFPLAPSSKSTSGGTAALGCLVKDYFPEPVTVSWNSGALTSGVHTFPAVLQSSGLYSLSSVVTVPSSSLGTQTYICNVNHKPSNTKVDKKVEPKSCDKTHTCPPCPAPELLGGPSVFLFPPKPKDTLMISRTPEVTCVVVDVSHEDPEVKFNWYVDGVEVHNAKTKPREEQYASTYRVVSVLTVLHQDWLNGKEYKCKVSNKALPAPIEKTISKAKGQPREPQVYTLPPSREEMTKNQVSLTCLVKGFYPSDIAVEWESNGQPENNYKTTPPVLDSDGSFFLYSKLTVDKSRWQQGNVFSCSVMHEALHNHYTQKSLSLSPGK

SEQ ID NO: 1188 - protein, 326 aa, synthetic construct; identical to SEQ ID NO: 50
  REGION 1..326: note = synthetic

SEQ ID NO: 1189 - protein, 377 aa, synthetic construct; identical to SEQ ID NO: 51
  REGION 1..377: note = synthetic

SEQ ID NO: 1190 - protein, 327 aa, synthetic construct
  REGION 1..327: note = synthetic
ASTKGPSVFPLAPCSRSTSESTAALGCLVKDYFPEPVTVSWNSGALTSGVHTFPAVLQSSGLYSLSSVVTVPSSSLGTKTYTCNVDHKPSNTKVDKRVESKYGPPCPSCPAPEFLGGPSVFLFPPKPKDTLMISRTPEVTCVVVDVSQEDPEVQFNWYVDGVEVHNAKTKPREEQFNSTYRVVSVLTVLHQDWLNGKEYKCKVSNKGLPSSIEKTISKAKGQPREPQVYTLPPSQEEMTKNQVSLTCLVKGFYPSDIAVEWESNGQPENNYKTTPPVLDSDGSFFLYSRLTVDKSRWQEGNVFSCSVMHEALHNHYTQKSLSLSPGK

SEQ ID NO: 1191 - protein, 327 aa, synthetic construct; identical to SEQ ID NO: 53
  REGION 1..327: note = synthetic

SEQ ID NO: 1192 - protein, 107 aa, synthetic construct [sequence omitted]

SEQ ID NO: 1193 - protein, 19 aa, synthetic construct
  REGION 1..19: note = synthetic
QVTHEGSTVEKTVAPTECS

SEQ ID NO: 1194 - protein, 120 aa, synthetic construct; identical to SEQ ID NO: 260
  REGION 1..120: note = synthetic

SEQ ID NO: 1195 - protein, 8 aa, synthetic construct
  REGION 1..8: note = synthetic
GYTFTDYN

SEQ ID NO: 1196 - protein, 8 aa, synthetic construct
  REGION 1..8: note = synthetic
IYPYIGGS

SEQ ID NO: 1197 - protein, 13 aa, synthetic construct
  REGION 1..13: note = synthetic
AREDKTARNAMDY

SEQ ID NO: 1198 - protein, 447 aa, synthetic construct
  REGION 1..447: note = synthetic
QVQLVQSGAEVKKPGASVKVSCKASGYTFTDYNINWVRQAPGQGLEWMGYIYPYIGGSGYAQKFQGRVTMTRDTSTSTVYMELSSLRSEDTAVYYCAREDKTARNAMDYWGQGTLVTVSSASTKGPSVFPLAPCSRSTSESTAALGCLVKDYFPEPVTVSWNSGALTSGVHTFPAVLQSSGLYSLSSVVTVPSSSLGTKTYTCNVDHKPSNTKVDKRVESKYGPPCPPCPAPEFLGGPSVFLFPPKPKDTLMISRTPEVTCVVVDVSQEDPEVQFNWYVDGVEVHNAKTKPREEQFNSTYRVVSVLTVLHQDWLNGKEYKCKVSNKGLPSSIEKTISKAKGQPREPQVYTLPPSQEEMTKNQVSLTCLVKGFYPSDIAVEWESNGQPENNYKTTPPVLDSDGSFFLYSRLTVDKSRWQEGNVFSCSVMHEALHNHYTQKSLSLSPGK

SEQ ID NO: 1199 - protein, 107 aa, synthetic construct; identical to SEQ ID NO: 265
  REGION 1..107: note = synthetic

SEQ ID NO: 1200 - protein, 6 aa, synthetic construct
  REGION 1..6: note = synthetic
ENIYSN

SEQ ID NO: 1201 - skipped

SEQ ID NO: 1202 - protein, 9 aa, synthetic construct
  REGION 1..9: note = synthetic
QHFWGTPYT

SEQ ID NO: 1203 - protein, 214 aa, synthetic construct; identical to SEQ ID NO: 269
  REGION 1..214: note = synthetic

SEQ ID NO: 1204 - protein, 119 aa, synthetic construct; identical to SEQ ID NO: 270
  REGION 1..119: note = synthetic

SEQ ID NO: 1205 - protein, 8 aa, synthetic construct
  REGION 1..8: note = synthetic
GYAFTNYL

SEQ ID NO: 1206 - protein, 8 aa, synthetic construct
  REGION 1..8: note = synthetic
INPGSGGI

SEQ ID NO: 1207 - protein, 12 aa, synthetic construct
  REGION 1..12: note = synthetic
ARSETHDTWFAY

SEQ ID NO: 1208 - protein, 446 aa, synthetic construct
  REGION 1..446: note = synthetic
QVQLVQSGAEVKKPGASVKVSCKASGYAFTNYLIEWVRQAPGQGLEWIGVINPGSGGIYYAQKFQGRVTMTADTSTSTVYMELSSLRSEDTAVYYCARSETHDTWFAYWGQGTLVTVSSASTKGPSVFPLAPCSRSTSESTAALGCLVKDYFPEPVTVSWNSGALTSGVHTFPAVLQSSGLYSLSSVVTVPSSSLGTKTYTCNVDHKPSNTKVDKRVESKYGPPCPPCPAPEFLGGPSVFLFPPKPKDTLMISRTPEVTCVVVDVSQEDPEVQFNWYVDGVEVHNAKTKPREEQFNSTYRVVSVLTVLHQDWLNGKEYKCKVSNKGLPSSIEKTISKAKGQPREPQVYTLPPSQEEMTKNQVSLTCLVKGFYPSDIAVEWESNGQPENNYKTTPPVLDSDGSFFLYSRLTVDKSRWQEGNVFSCSVMHEALHNHYTQKSLSLSPGK

SEQ ID NO: 1209 - protein, 107 aa, synthetic construct; identical to SEQ ID NO: 275
  REGION 1..107: note = synthetic

SEQ ID NO: 1210 - protein, 6 aa, synthetic construct
  REGION 1..6: note = synthetic
QSVRIA

SEQ ID NO: 1211 - skipped

SEQ ID NO: 1212 - protein, 9 aa, synthetic construct
  REGION 1..9: note = synthetic
LQHWNYPYT

SEQ ID NO: 1213 - protein, 214 aa, synthetic construct; identical to SEQ ID NO: 279
  REGION 1..214: note = synthetic

SEQ ID NO: 1214 - protein, 8 aa, synthetic construct
  REGION 1..8: note = synthetic
GFTFSNFG

SEQ ID NO: 1215 - protein, 8 aa, synthetic construct
  REGION 1..8: note = synthetic
GFTFSNFG

SEQ ID NO: 1216 - protein, 8 aa, synthetic construct
  REGION 1..8: note = synthetic
ISSGSSTI

SEQ ID NO: 1217 - protein, 14 aa, synthetic construct
  REGION 1..14: note = synthetic
TRLDYYTNSYSMDH

SEQ ID NO: 1218 - protein, 106 aa, synthetic construct
  REGION 1..106: note = synthetic
QIVLTQSPALMSASPGEKVTLTCSASSSLPYIYWYQQKPGSSPKPWIYLTSNLASGVPARFSGSRSGTSYSLTISSVEAEDAATYYCQQWSSNPFTFGSGTKLEIK

SEQ ID NO: 1219 - protein, 5 aa, synthetic construct
  REGION 1..5: note = synthetic
SSLPY

SEQ ID NO: 1220 - skipped

SEQ ID NO: 1221 - protein, 9 aa, synthetic construct
  REGION 1..9: note = synthetic
QQWSSNPFT

SEQ ID NO: 1222 - protein, 117 aa, synthetic construct
  REGION 1..117: note = synthetic
QVQLQQSGAELAKPGASVKMSCKASGYTFTSNWMHWVKQRPGQGLEWIGYINPSNGYTECNQKFRDKATLSADKSSSTAYMQLNSLTSADSAVYYCALMISAWLPYWGQGTLVTVSA

SEQ ID NO: 1223 - protein, 8 aa, synthetic construct
  REGION 1..8: note = synthetic
GYTFTSNW

SEQ ID NO: 1224 - protein, 8 aa, synthetic construct
  REGION 1..8: note = synthetic
INPSNGYT

SEQ ID NO: 1225 - protein, 10 aa, synthetic construct
  REGION 1..10: note = synthetic
ALMISAWLPY

SEQ ID NO: 1226 - protein, 111 aa, synthetic construct
  REGION 1..111: note = synthetic
DIVLTQSPASLAISLGQRATISCRASQSVSASSYSYVHWYQQKPGQPPKLLIKYASSLESGVPARFSGSGSGTDFTLNIHPVEEEDTATYYCLHTWEIPYTFGGGTKLEIK

SEQ ID NO: 1227 - protein, 10 aa, synthetic construct
  REGION 1..10: note = synthetic
QSVSASSYSY

SEQ ID NO: 1228 - skipped

SEQ ID NO: 1229 - protein, 9 aa, synthetic construct
  REGION 1..9: note = synthetic
LHTWEIPYT

SEQ ID NO: 1230 - protein, 116 aa, synthetic construct
  REGION 1..116: note = synthetic
QVQLQQSGAELTRPGASVNLSCKASGYTFTSYWMQWVKQRPGQGLEWIGAIYPGDGDTRFNQKFKGKATLTADESSSTAYMQLSSLASEDSAVYYCATYYRYDDYWGQGTTLTVSS

SEQ ID NO: 1231 - protein, 8 aa, synthetic construct
  REGION 1..8: note = synthetic
GYTFTSYW

SEQ ID NO: 1232 - protein, 8 aa, synthetic construct
  REGION 1..8: note = synthetic
IYPGDGDT

SEQ ID NO: 1233 - protein, 9 aa, synthetic construct
  REGION 1..9: note = synthetic
ATYYRYDDY

SEQ ID NO: 1234 - protein, 106 aa, synthetic construct
  REGION 1..106: note = synthetic
QIVLTQSPAIMSASPGEKVTMTCSASSSVSYMHWYQQKSGTSPKRWIYDTSKLASGVPTRFSGSGSGTSYSLTISSMEAEDAATYYCQQWSSNPYTFGGGTKLEIK

SEQ ID NO: 1235 - protein, 5 aa, synthetic construct
  REGION 1..5: note = synthetic
SSVSY

SEQ ID NO: 1236 - skipped

SEQ ID NO: 1237 - protein, 9 aa, synthetic construct
  REGION 1..9: note = synthetic
QQWSSNPYT

SEQ ID NO: 1238 - protein, 122 aa, synthetic construct
  REGION 1..122: note = synthetic
EVQLQQSGPDLVKPGASMKISCKASGYTFIDYNIHWVKQSQGKSLDWIGYIYPYNGGTGYNQKFKNKATLTVDSSSSTAYMEVRSLTFEDSAVYFCAREADYYGNRGQFDYWGQGTLVTVSA

SEQ ID NO: 1239 - protein, 8 aa, synthetic construct
  REGION 1..8: note = synthetic
GYTFIDYN

SEQ ID NO: 1240 - protein, 8 aa, synthetic construct
  REGION 1..8: note = synthetic
IYPYNGGT

SEQ ID NO: 1241 - protein, 15 aa, synthetic construct
  REGION 1..15: note = synthetic
AREADYYGNRGQFDY

SEQ ID NO: 1242 - protein, 107 aa, synthetic construct
  REGION 1..107: note = synthetic
DIQMTQSPASLSVSVGETVTITCRASENIFSNLAWYQQKQGKSPQLLVYGEANLADGVPSRFSGSGSGTQYSLKINSLQSEDFGNYYCQHFWGTPYTFGGGTTLEIK

SEQ ID NO: 1243 - protein, 6 aa, synthetic construct
  REGION 1..6: note = synthetic
ENIFSN

SEQ ID NO: 1244 - skipped

SEQ ID NO: 1245 - protein, 9 aa, synthetic construct
  REGION 1..9: note = synthetic
QHFWGTPYT

SEQ ID NO: 1246 - protein, 120 aa, synthetic construct
  REGION 1..120: note = synthetic
QVTLKESGPGILQPSQTLSLTCSFSGFSLNTSGTGVGWIRQPSGKGLEWLTHIWWNDNKFYNTFLKSRLTISKETSNNQVFLKIASVDTADAATYYCARMAYGNLWFVNWGQGTLVAVST

SEQ ID NO: 1247 - protein, 10 aa, synthetic construct
  REGION 1..10: note = synthetic
GFSLNTSGTG

SEQ ID NO: 1248 - protein, 7 aa, synthetic construct
  REGION 1..7: note = synthetic
IWWNDNK

SEQ ID NO: 1249 - protein, 12 aa, synthetic construct
  REGION 1..12: note = synthetic
ARMAYGNLWFVN

SEQ ID NO: 1250 - protein, 111 aa, synthetic construct
  REGION 1..111: note = synthetic
DIVLTQSPASLAVSLGQRASISCRASRSVTISGYSYMYWYQQKPGQPPRLLFYLASNLASGVPARFSGSGSGTDFTLNIHPVEEEDAAIYYCQHSRELPYTFGGGTKLEIK

SEQ ID NO: 1251 - protein, 10 aa, synthetic construct
  REGION 1..10: note = synthetic
RSVTISGYSY

SEQ ID NO: 1252 - skipped

SEQ ID NO: 1253 - protein, 9 aa, synthetic construct
  REGION 1..9: note = synthetic
QHSRELPYT

SEQ ID NO: 1254 - protein, 123 aa, synthetic construct
  REGION 1..123: note = synthetic
QIQLVQSGPELKKPRETVKISCKASGYTFTDYSMHWVKQAPGKGLKWMGWINTETGEPTYADDFKGRFAFSLEASASSAYLQINILKDEDTATYFCARSRGGYYEDYYALDYWGQGTSVTVSS

SEQ ID NO: 1255 - protein, 8 aa, synthetic construct
  REGION 1..8: note = synthetic
GYTFTDYS

SEQ ID NO: 1256 - protein, 8 aa, synthetic construct
  REGION 1..8: note = synthetic
INTETGEP

SEQ ID NO: 1257 - protein, 16 aa, synthetic construct
  REGION 1..16: note = synthetic
ARSRGGYYEDYYALDY

SEQ ID NO: 1258 - protein, 107 aa, synthetic construct
  REGION 1..107: note = synthetic
DIQMTQSPASLSASVGESVTITCRASGNIHYYLAWYQQKQGKSPQLLVYNAKNLADGVPSRFSGSGSGTQFSLKINSLQPEDFGSYYCQHFWISPPTFGGGTKLEIK

SEQ ID NO: 1259 - protein, 6 aa, synthetic construct
  REGION 1..6: note = synthetic
GNIHYY

SEQ ID NO: 1260 - skipped

SEQ ID NO: 1261 - protein, 9 aa, synthetic construct
  REGION 1..9: note = synthetic
QHFWISPPT

SEQ ID NO: 1262 - protein, 118 aa, synthetic construct
  REGION 1..118: note = synthetic
EVQLRQSGADLVKPGASVKLSCTASGFNIKDTYIDWVKQRPEQGLDWIGRIDPANGNTKYDPKFQGKATIITDTSSNTAYLQLSNLTSEDTAVYYCARYGSYPYFDYWGRGTTLAVSS

SEQ ID NO: 1263 - protein, 8 aa, synthetic construct
  REGION 1..8: note = synthetic
GFNIKDTY

SEQ ID NO: 1264 - protein, 8 aa, synthetic construct
  REGION 1..8: note = synthetic
IDPANGNT

SEQ ID NO: 1265 - protein, 11 aa, synthetic construct
  REGION 1..11: note = synthetic
ARYGSYPYFDY

SEQ ID NO: 1266 - protein, 107 aa, synthetic construct
  REGION 1..107: note = synthetic
SIVMTQTPKFLLISAGDRVTITCKASQSVRNDVAWYQQKPGQSPKLLMYYASNRYTGVPDRFTGSGYGTDFTFTISTVQAEDLAVYFCQQDYSSPPTFGGGTKLEIK

SEQ ID NO: 1267 - protein, 6 aa, synthetic construct
  REGION 1..6: note = synthetic
QSVRND

SEQ ID NO: 1268 - skipped

SEQ ID NO: 1269 - protein, 9 aa, synthetic construct
  REGION 1..9: note = synthetic
QQDYSSPPT

SEQ ID NO: 1270 - protein, 118 aa, synthetic construct
  REGION 1..118: note = synthetic
QVQLQQSGPELVRPGVSVKISCKVSGYTFTDYVMHWVKQSHAKSLEWIGIISPYSGNTNYNQNFKGKATMTVDKSSSTAYMALARLTSEDSAIYYCAREGDLPMFAYWGQGTLVTVSA

SEQ ID NO: 1271 - protein, 8 aa, synthetic construct
  REGION 1..8: note = synthetic
GYTFTDYV

SEQ ID NO: 1272 - protein, 8 aa, synthetic construct
  REGION 1..8: note = synthetic
ISPYSGNT

SEQ ID NO: 1273 - protein, 11 aa, synthetic construct
  REGION 1..11: note = synthetic
AREGDLPMFAY

SEQ ID NO: 1274 - protein, 106 aa, synthetic construct
  REGION 1..106: note = synthetic
QIVLTQSPTIMSASPGEKVTMTCSASSSVSYIYWYQQNPGSSPRLLIYDTSILASGVPFRFSGSGSGTSYSLTISRMEAEDAATYYCQQWTSYPLTFGSGTKLELK

SEQ ID NO: 1275 - protein, 5 aa, synthetic construct
  REGION 1..5: note = synthetic
SSVSY

SEQ ID NO: 1276 - skipped

SEQ ID NO: 1277 - protein, 9 aa, synthetic construct
  REGION 1..9: note = synthetic
QQWTSYPLT

SEQ ID NO: 1278 - protein, 120 aa, synthetic construct
  REGION 1..120: note = synthetic
EVQLQQSGPELVKPGASVKISCKASGYTFTDYNINWVKQSHGKSLEWIGYIYPYIGGSGYNQKFKSKATLSADNPSSTAYMELRSLTSEDSAVYYCAREDKTARNAMDYWGQGTPVTVSS

SEQ ID NO: 1279 - protein, 8 aa, synthetic construct
  REGION 1..8: note = synthetic
GYTFTDYN

SEQ ID NO: 1280 - protein, 8 aa, synthetic construct
  REGION 1..8: note = synthetic
IYPYIGGS

SEQ ID NO: 1281 - protein, 13 aa, synthetic construct
  REGION 1..13: note = synthetic
AREDKTARNAMDY

SEQ ID NO: 1282 - protein, 107 aa, synthetic construct
  REGION 1..107: note = synthetic
DIQMTQSPASLSVSVGETVTIICRVSENIYSNLAWYQQKQGKSPQLLVYEATNLAEGVPSRFSGSGSGTQYSLKINSLQSEDFGSYYCQHFWGTPYTFGGGTKLEIK

SEQ ID NO: 1283 - protein, 6 aa, synthetic construct
  REGION 1..6: note = synthetic
ENIYSN

SEQ ID NO: 1284 - skipped

SEQ ID NO: 1285 - protein, 9 aa, synthetic construct
  REGION 1..9: note = synthetic
QHFWGTPYT

SEQ ID NO: 1286 - protein, 120 aa, synthetic construct
  REGION 1..120: note = synthetic
DVQLQESGPGLVKPSQSLSLTCTVTGYSITSDYAWNWIRQFPGNKLEWMGYISYSGSTSYNPSLKSRISITRDTSKNQFFLQLNSVTTEDTATYYCARHYRYPPYAMDYWGQGTSVTVSS

SEQ ID NO: 1287 - protein, 9 aa, synthetic construct
  REGION 1..9: note = synthetic
GYSITSDYA

SEQ ID NO: 1288 - protein, 7 aa, synthetic construct
  REGION 1..7: note = synthetic
ISYSGST

SEQ ID NO: 1289 - protein, 13 aa, synthetic construct
  REGION 1..13: note = synthetic
ARHYRYPPYAMDY

SEQ ID NO: 1290 - protein, 113 aa, synthetic construct
  REGION 1..113: note = synthetic
DIVMTQSPSSLAMSVGQKVTMSCKSSQSLLNSSNQKNYLAWYQQKPGQSPKLLVYFASTRESGVPDRFIGSGSGTDFTLTITSVQAEDLADYFCQQHYSTPFTFGSGTKLEIK

SEQ ID NO: 1291 - protein, 12 aa, synthetic construct
  REGION 1..12: note = synthetic
QSLLNSSNQKNY

SEQ ID NO: 1292 - skipped

SEQ ID NO: 1293 - protein, 9 aa, synthetic construct
  REGION 1..9: note = synthetic
QQHYSTPFT

SEQ ID NO: 1294 - protein, 118 aa, synthetic construct
  REGION 1..118: note = synthetic
QVQLKQSGPGLVQPSQSLSITCTVSGFSLTSFGVHWVRQSPGKGLEWLGVIWSGGTTVYDAAFISRLSISKDNSKSQVFFKMNSLQTNDTAIYYCARKRGNFYVMDYWGQGTSVTVSS

SEQ ID NO: 1295 - protein, 8 aa, synthetic construct
  REGION 1..8: note = synthetic
GFSLTSFG

SEQ ID NO: 1296 - protein, 7 aa, synthetic construct
  REGION 1..7: note = synthetic
IWSGGTT

SEQ ID NO: 1297 - protein, 12 aa, synthetic construct
  REGION 1..12: note = synthetic
ARKRGNFYVMDY

SEQ ID NO: 1298 - protein, 113 aa, synthetic construct; identical to SEQ ID NO: 1290
  REGION 1..113: note = synthetic

SEQ ID NO: 1299 - protein, 12 aa, synthetic construct
  REGION 1..12: note = synthetic
QSLLNSSNQKNY

SEQ ID NO: 1300 - skipped

SEQ ID NO: 1301 - protein, 9 aa, synthetic construct
  REGION 1..9: note = synthetic
QQHYSTPFT

SEQ ID NO: 1302 - protein, 118 aa, synthetic construct
  REGION 1..118: note = synthetic
QVQLQQPGSELVRPGTSVKLSCKASGYTFTSYWVHWVRQRHGQGLEWIGNVYPGSGSTNYDEKFKSKGTLTVDTSSSTAYMHLSSLTSEDSAVYYCTRGVLRFPLDYWGQGTTLTVSS

SEQ ID NO: 1303 - protein, 8 aa, synthetic construct
  REGION 1..8: note = synthetic
GYTFTSYW

SEQ ID NO: 1304 - protein, 8 aa, synthetic construct
  REGION 1..8: note = synthetic
VYPGSGST

SEQ ID NO: 1305 - protein, 11 aa, synthetic construct
  REGION 1..11: note = synthetic
TRGVLRFPLDY

SEQ ID NO: 1306 - protein, 112 aa, synthetic construct
  REGION 1..112: note = sythetic
DIVMTQAAPSVPVTPGESVSISCRSSKSLLHSNGNTYLYWFLQRPGQSPHLLIYRMSNLASGVPDRFSGSGSGTAFTLRISRVEAEDVGVYYCMQHLEYPLTFGAGTKLELK

SEQ ID NO: 1307 - protein, 11 aa, synthetic construct
  REGION 1..11: note = synthetic
KSLLHSNGNTY

SEQ ID NO: 1308 - skipped

SEQ ID NO: 1309 - protein, 9 aa, synthetic construct
  REGION 1..9: note = synthetic
MQHLEYPLT

SEQ ID NO: 1310 - protein, 118 aa, synthetic construct
  REGION 1..118: note = synthetic
QVQLQQSGPEVVRPGVSVKISCKGSGYKFPDYVMHWVKQSHAKSLEWIGIISIYSGNTNYNQKFKGKATMTVDKSSSTAYMELARLTSEDSAIYYCAREGDLPMFAYWGQGTLVTVSA

SEQ ID NO: 1311 - protein, 8 aa, synthetic construct
  REGION 1..8: note = synthetic
GYKFPDYV

SEQ ID NO: 1312 - protein, 8 aa, synthetic construct
  REGION 1..8: note = synthetic
ISIYSGNT

SEQ ID NO: 1313 - protein, 11 aa, synthetic construct
  REGION 1..11: note = synthetic
AREGDLPMFAY

SEQ ID NO: 1314 - protein, 106 aa, synthetic construct
  REGION 1..106: note = synthetic
QIVLTQSPAIMSASPGEKVTMTCNASSSVSYMYWYQQKPISSPRLLIYDTSNLASGVPVRFSGSGSGTSYSLTIGRMEAEDAATYYCQQWSSYPLTFGAGTKVEVK

SEQ ID NO: 1315 - protein, 5 aa, synthetic construct
  REGION 1..5: note = synthetic
SSVSY

SEQ ID NO: 1316 - skipped

SEQ ID NO: 1317 - protein, 9 aa, synthetic construct
  REGION 1..9: note = synthetic
QQWSSYPLT

SEQ ID NO: 1318 - protein, 122 aa, synthetic construct
  REGION 1..122: note = synthetic
QVQLKESGPGLVAPSQSLSITCTVSGFSLTAYNINWVRQPPGKGLEWLGMIWGDGNTDYNSPLKSRLTISKDNSKSQVFLKMDSLQTDDTARYYCARDLKVRRDSPYTMDYWGQGTSVTVSS

SEQ ID NO: 1319 - protein, 8 aa, synthetic construct
  REGION 1..8: note = synthetic
GFSLTAYN

SEQ ID NO: 1320 - protein, 7 aa, synthetic construct
  REGION 1..7: note = synthetic
IWGDGNT

SEQ ID NO: 1321 - protein, 16 aa, synthetic construct
  REGION 1..16: note = synthetic
ARDLKVRRDSPYTMDY

SEQ ID NO: 1322 - protein, 112 aa, synthetic construct
  REGION 1..112: note = synthetic
NIMMTQSPSSLAVSAGEKVTMSCKSSQSVLYSSNQKNYLAWYQQKPGQSPKLLIYWASNRESGVPDRFTGSGSGTDFTLTISSVQAEDLAVYYCHQYLSSYTFGGGTKLEIK

SEQ ID NO: 1323 - protein, 12 aa, synthetic construct
  REGION 1..12: note = synthetic
QSVLYSSNQKNY

SEQ ID NO: 1324 - skipped

SEQ ID NO: 1325 - protein, 8 aa, synthetic construct
  REGION 1..8: note = synthetic
HQYLSSYT

SEQ ID NO: 1326 - protein, 124 aa, synthetic construct
  REGION 1..124: note = synthetic
DVQLQESGPGLVKPSQSLSLTCTVTGYSLTSDYAWNWIRQFPGNKLEWMGYITYSGGTTYNPSLKSRISITRDTSKNQFFLQLTSVTTEDTATYYCARRGSGTTVVGDWYFDVWGAGTTVTVSS

SEQ ID NO: 1327 - protein, 9 aa, synthetic construct
  REGION 1..9: note = synthetic
GYSLTSDYA

SEQ ID NO: 1328 - protein, 7 aa, synthetic construct
  REGION 1..7: note = synthetic
ITYSGGT

SEQ ID NO: 1329 - protein, 17 aa, synthetic construct
  REGION 1..17: note = synthetic
ARRGSGTTVVGDWYFDV

SEQ ID NO: 1330 - protein, 113 aa, synthetic construct
  REGION 1..113: note = synthetic
DIVMSQSPSSLAVSVGEKVTMSCKSSQSLLYSFNQKYYLAWYQQKPGQSPKLLIYWASTRESGVPDRFTGSGSGTDFTPTISSVTAEDLAVYYCQQFYTYPYTFGGGTKLEMK

SEQ ID NO: 1331 - protein, 12 aa, synthetic construct
  REGION 1..12: note = synthetic
QSLLYSFNQKYY

SEQ ID NO: 1332 - skipped

SEQ ID NO: 1333 - protein, 9 aa, synthetic construct
  REGION 1..9: note = synthetic
QQFYTYPYT

SEQ ID NO: 1334 - protein, 122 aa, synthetic construct
  REGION 1..122: note = synthetic
EVQVQQSGPELVKPGASVKISCKASGYTFTKSNMHWVKQSHGKSLEWIGYIYPYNGGTGYNQNFKSKATLTVDISSSTAYMELRSLTLEDSAVYLCAREADYYGNRGQFDYWGQGTLVTVSA

SEQ ID NO: 1335 - protein, 8 aa, synthetic construct
  REGION 1..8: note = synthetic
GYTFTKSN

SEQ ID NO: 1336 - protein, 8 aa, synthetic construct
  REGION 1..8: note = synthetic
IYPYNGGT

SEQ ID NO: 1337 - protein, 15 aa, synthetic construct
  REGION 1..15: note = synthetic
AREADYYGNRGQFDY

SEQ ID NO: 1338 - protein, 107 aa, synthetic construct
  REGION 1..107: note = synthetic
DIQMTQSPASLSVSVGETVTITCRASDNIFSNLAWYHQKQGKSPHLLVYGATNLADGVPSRFSGSGSGTQYSLKINSLQSEDFGDYYCQHFWGTPYTFGGGTKLEIK

SEQ ID NO: 1339 - protein, 6 aa, synthetic construct
  REGION 1..6: note = synthetic
DNIFSN

SEQ ID NO: 1340 - skipped

SEQ ID NO: 1341 - protein, 9 aa, synthetic construct
  REGION 1..9: note = synthetic
QHFWGTPYT

SEQ ID NO: 1342 - protein, 119 aa, synthetic construct
  REGION 1..119: note = synthetic
QVQLQQSGAELMRPGTSVKVSCKASGYAFTNHLIEWIKQRPGQGLEWIGVINPGSDSTDYNEKFKDKATLTADKSSSTAYMQLSSLTSDDSAVYFCARSLYYNSWFVYWGQGTLVTVSA

SEQ ID NO: 1343 - protein, 8 aa, synthetic construct
  REGION 1..8: note = synthetic
GYAFTNHL

SEQ ID NO: 1344 - protein, 8 aa, synthetic construct
  REGION 1..8: note = synthetic
INPGSDST

SEQ ID NO: 1345 - protein, 12 aa, synthetic construct
  REGION 1..12: note = synthetic
ARSLYYNSWFVY

SEQ ID NO: 1346 - protein, 107 aa, synthetic construct
  REGION 1..107: note = synthetic
DIQMTQSPASLSASVGETVTITCRASENIYSYLAWYQQKRGKSPQLLVYNAKTLVEGVPSRFSGSGSGTQFSLKINSLQPEDFGSYYCQHHYGTPYTFGGGTKLEIK

SEQ ID NO: 1347 - protein, 6 aa, synthetic construct
  REGION 1..6: note = synthetic
ENIYSY

SEQ ID NO: 1348 - skipped

SEQ ID NO: 1349 - protein, 9 aa, synthetic construct
  REGION 1..9: note = synthetic
QHHYGTPYT

SEQ ID NO: 1350 - protein, 118 aa, synthetic construct
  REGION 1..118: note = synthetic
EVQLQQSGAELVKPGASVRLSCTASGFSIRDTYIHWVKQRPEQGLDWIGKIDPANGKSEYDPKFQGRATMTTDTSSNTAYLQLSSLTSEDTAVYYCTRYGYYPYFDVWGAGTTVTVFS

SEQ ID NO: 1351 - protein, 8 aa, synthetic construct
  REGION 1..8: note = synthetic
GFSIRDTY

SEQ ID NO: 1352 - protein, 8 aa, synthetic construct
  REGION 1..8: note = synthetic
IDPANGKS

SEQ ID NO: 1353 - protein, 11 aa, synthetic construct
  REGION 1..11: note = synthetic
TRYGYYPYFDV

SEQ ID NO: 1354 - protein, 107 aa, synthetic construct
  REGION 1..107: note = synthetic
SIVMTQTPKFLLVSAGDRVAITCKASQSVRHDVVWYQQKPGQSPKLLIYYASSRYTGVPDRFTGSGYGTDFTFTISTVQAEDLALYFCLQDFSSPWTFGGGTKLEIK

SEQ ID NO: 1355 - protein, 6 aa, synthetic construct
  REGION 1..6: note = synthetic
QSVRHD

SEQ ID NO: 1356 - skipped

SEQ ID NO: 1357 - protein, 9 aa, synthetic construct
  REGION 1..9: note = synthetic
LQDFSSPWT

SEQ ID NO: 1358 - protein, 120 aa, synthetic construct
  REGION 1..120: note = synthetic
EVQLQQSGPELVKPGASVKISCKTSGYTFTKNTMHWVRQSHGKSLEWIGGINPNSGGASFNQKFMGKATLTVDKSSSTAYMELRSLTSEDSAVYYCARDGYDGDWFFDVWGAGTTVTVSS

SEQ ID NO: 1359 - protein, 8 aa, synthetic construct
  REGION 1..8: note = synthetic
GYTFTKNT

SEQ ID NO: 1360 - protein, 8 aa, synthetic construct
  REGION 1..8: note = synthetic
INPNSGGA

SEQ ID NO: 1361 - protein, 13 aa, synthetic construct
  REGION 1..13: note = synthetic
ARDGYDGDWFFDV

SEQ ID NO: 1362 - protein, 107 aa, synthetic construct
  REGION 1..107: note = synthetic
DIQMNQSPFSLSASLGDTVTITCHASQNIYVWLSWYQQKPGNIPKLLIYKASDLHTGVPSRFSGSGSGTDFTLNISSLQPEDIATYYCQQGQSYPRTFGGGTKLEIK

SEQ ID NO: 1363 - protein, 6 aa, synthetic construct
  REGION 1..6: note = synthetic
QNIYVW

SEQ ID NO: 1364 - skipped

SEQ ID NO: 1365 - protein, 9 aa, synthetic construct
  REGION 1..9: note = synthetic
QQGQSYPRT

SEQ ID NO: 1366 - protein, 114 aa, synthetic construct
  REGION 1..114: note = synthetic
QVQLKESGPGLVAPSQSLSITCTVSGFSLIGHGVNWIRQPPGKGLEWLGVIWGDGNTDYNSALKSRLSISKDNSKSQVFLKMNSLQTDDTARYFCAVNSAMDYWGQGTAVTVSS

SEQ ID NO: 1367 - protein, 8 aa, synthetic construct
  REGION 1..8: note = synthetic
GFSLIGHG

SEQ ID NO: 1368 - protein, 7 aa, synthetic construct
  REGION 1..7: note = synthetic
IWGDGNT

SEQ ID NO: 1369 - protein, 8 aa, synthetic construct
  REGION 1..8: note = synthetic
AVNSAMDY

SEQ ID NO: 1370 - protein, 107 aa, synthetic construct
  REGION 1..107: note = synthetic
NIVMTQSPKSMSMSVGERVTLNCTASENVASFVSWYQQKPEQSPKLLIYGTSNRYTGVPDRFTGSGSATDFTLTISSVQAEDLGDYHCGQSYNYPFTFGSGTKLEIE

SEQ ID NO: 1371 - protein, 6 aa, synthetic construct
  REGION 1..6: note = synthetic
ENVASF

SEQ ID NO: 1372 - skipped

SEQ ID NO: 1373 - protein, 9 aa, synthetic construct
  REGION 1..9: note = synthetic
GQSYNYPFT

SEQ ID NO: 1374 - protein, 119 aa, synthetic construct
  REGION 1..119: note = synthetic
QVQLQQSGAELVRPGASVKVSCKTSGYAFTNYLIEWVKQRPGQGLEWIGVINPGSGGIYYNDKFKVKTTLTADKSSSTAYMQLSSLTSDDSAVYFCARSETHDTWFAYWGQGTLVTVSA

SEQ ID NO: 1375 - protein, 8 aa, synthetic construct
  REGION 1..8: note = synthetic
GYAFTNYL

SEQ ID NO: 1376 - protein, 8 aa, synthetic construct
  REGION 1..8: note = synthetic
INPGSGGI

SEQ ID NO: 1377 - protein, 12 aa, synthetic construct
  REGION 1..12: note = synthetic
ARSETHDTWFAY

SEQ ID NO: 1378 - protein, 108 aa, synthetic construct
  REGION 1..108: note = synthetic
DIVMTQSQKFISTSVGDRVSITCKASQSVRIAVAWFQQKPGQSPKALIYLASTRHTGVPDRFTGSGSGTDFTLTISNVQSEDLADYFCLQHWNYPYTFGGGTKLEIKR

SEQ ID NO: 1379 - protein, 6 aa, synthetic construct
  REGION 1..6: note = synthetic
QSVRIA

SEQ ID NO: 1380-1381 - skipped (2 entries)

SEQ ID NO: 1382 - protein, 120 aa, synthetic construct
  REGION 1..120: note = synthetic
QVQLQQSGAELVRPGTSVKMSCKAAGYTFTNYWIGWVKQRPGHGLEWIGDIYPGGGYTNYNEKFKGKATLTADTSSSTAYMQLSSLTSEDSAIYYCASPYYGSSYGFAFWGQGTLVTVSA

SEQ ID NO: 1383 - protein, 8 aa, synthetic construct
  REGION 1..8: note = synthetc
GYTFTNYW

SEQ ID NO: 1384 - protein, 8 aa, synthetic construct
  REGION 1..8: note = synthetic
IYPGGGYT

SEQ ID NO: 1385 - protein, 13 aa, synthetic construct
  REGION 1..13: note = synthetic
ASPYYGSSYGFAF

SEQ ID NO: 1386 - protein, 108 aa, synthetic construct; identical to SEQ ID NO: 1378
  REGION 1..108: note = synthetic

SEQ ID NO: 1387 - protein, 6 aa, synthetic construct
  REGION 1..6: note = synthetic
QSVRIA

SEQ ID NO: 1388 - skipped

SEQ ID NO: 1389 - protein, 9 aa, synthetic construct
  REGION 1..9: note = synthetic
LQHWNYPYT

SEQ ID NO: 1390 - protein, 117 aa, synthetic construct
  REGION 1..117: note = synthetic
QVQLKESGPGLVAPSQSLSITCTVSGFSLSGYGIKWVRQPPGKGLEWLGTIWGDGSTDYNSALKSRLSISKDNSKSQVFLKMTSLQTDDTARYYCASDSLGITFGYWGQGTLVTVSA

SEQ ID NO: 1391 - protein, 8 aa, synthetic construct
  REGION 1..8: note = synthetic
GFSLSGYG

SEQ ID NO: 1392 - protein, 7 aa, synthetic construct
  REGION 1..7: note = synthetic
IWGDGST

SEQ ID NO: 1393 - protein, 11 aa, synthetic construct
  REGION 1..11: note = synthetic
ASDSLGITFGY

SEQ ID NO: 1394 - protein, 107 aa, synthetic construct
  REGION 1..107: note = synthetic
DIQMTQTTSSLSASLGDRVTISCRASQDISNYLNWYQQKPDGTVKLLIYYTSRLHSGVPSRFSGSGSGTDYSLTISNLEQEDIATYFCQQGNTLPLTFGAGTKLELK

SEQ ID NO: 1395 - protein, 6 aa, synthetic construct
  REGION 1..6: note = synthetic
QDISNY

SEQ ID NO: 1396 - skipped

SEQ ID NO: 1397 - protein, 9 aa, synthetic construct
  REGION 1..9: note = synthetic
QQGNTLPLT

SEQ ID NO: 1398 - protein, 120 aa, synthetic construct
  REGION 1..120: note = synthetic
QVQLKESGPGLVAPSQSLSITCTVSGFSLTSYAITWVRQPPGKGLEWLGVIWPGGGTNYNSALKSRLSISKDNSKSHLFLKMNSLQTDDTARYYCVRSYDGYLDWYFDVWGTGTTVTVSS

SEQ ID NO: 1399 - protein, 8 aa, synthetic construct
  REGION 1..8: note = synthetic
GFSLTSYA

SEQ ID NO: 1400 - protein, 7 aa, synthetic construct
  REGION 1..7: note = synthetic
IWPGGGT

SEQ ID NO: 1401 - protein, 14 aa, synthetic construct
  REGION 1..14: note = synthetic
VRSYDGYLDWYFDV

SEQ ID NO: 1402 - protein, 107 aa, synthetic construct
  REGION 1..107: note = synthetic
NIVMTQSPKSMSMSVGERVTLSCKASENVGTYVSWYQQKPDQSPKLLIYGASNRYTGVPDRFTGSGSATDFTLIISSVQAEDLSDYHCGQSYSYPYTFGGGTKLEII

SEQ ID NO: 1403 - protein, 6 aa, synthetic construct
  REGION 1..6: note = synthetic
ENVGTY

SEQ ID NO: 1404 - skipped

SEQ ID NO: 1405 - protein, 9 aa, synthetic construct
  REGION 1..9: note = synthetic
GQSYSYPYT

SEQ ID NO: 1406 - protein, 123 aa, synthetic construct
  REGION 1..123: note = synthetic
QIQLVQSGPDLKKPGETVKISCKASGYTFTTYGMSWVKQAPGRGLKWMGWINTYSGVSTFPDDFKGRFAFSLETSASTAYLQINNLKNEDSATYFCARLGMGSTTGAGYFDVWGTGTTVTVSS

SEQ ID NO: 1407 - protein, 8 aa, synthetic construct
  REGION 1..8: note = synthetic
GYTFTTYG

SEQ ID NO: 1408 - protein, 8 aa, synthetic construct
  REGION 1..8: note = synthetic
INTYSGVS

SEQ ID NO: 1409 - protein, 16 aa, synthetic construct
  REGION 1..16: note = synthetic
ARLGMGSTTGAGYFDV

SEQ ID NO: 1410 - protein, 108 aa, synthetic construct
  REGION 1..108: note = synthetic
DIVLTQSPAIMSASPGEKVTMTCSASSSVSSWYLHWYQQKSGASPKLWIYGTSNLASGVPARFSGSGSGTSYSLTISSVEAEDAATYYCQQYRSDPYTFGSGTKLEIK

SEQ ID NO: 1411 - protein, 7 aa, synthetic construct
  REGION 1..7: note = synthetic
SSVSSWY

SEQ ID NO: 1412 - skipped

SEQ ID NO: 1413 - protein, 9 aa, synthetic construct
  REGION 1..9: note = synthetic
QQYRSDPYT

SEQ ID NO: 1414 - protein, 123 aa, synthetic construct
  REGION 1..123: note = synthetic
QIQLVQSGPELKKPGETVKISCKASGYTFTTYGMSWVKQAPGKGLKWMGWINTYSGVSTYADDFEGRFAFSLETSVSTAYLQINNLKNEDTATYFCARLGRGSTTGAGYLDVWGTGTTVTVSS

SEQ ID NO: 1415 - protein, 8 aa, synthetic construct
  REGION 1..8: note = synthetic
GYTFTTYG

SEQ ID NO: 1416 - protein, 8 aa, synthetic construct
  REGION 1..8: note = synthetic
INTYSGVS

SEQ ID NO: 1417 - protein, 16 aa, synthetic construct
  REGION 1..16: note = synthetic
ARLGRGSTTGAGYLDV

SEQ ID NO: 1418 - protein, 108 aa, synthetic construct
  REGION 1..108: note = synthetic
DIVLTQSPAIMSASPGEKVSMTCSASSSVSSWYLHWYQQKSGASPKLWIYGTSNLASGVPARFSGSGSGTSYSLTISSVEAEDAATYYCQQYHSDPYTFGSGTKLEIK

SEQ ID NO: 1419 - protein, 7 aa, synthetic construct
  REGION 1..7: note = synthetic
SSVSSWY

SEQ ID NO: 1420 - skipped

SEQ ID NO: 1421 - protein, 9 aa, synthetic construct
  REGION 1..9: note = synthetic
QQYHSDPYT

SEQ ID NO: 1422 - protein, 123 aa, synthetic construct; identical to SEQ ID NO: 1406
  REGION 1..123: note = synthetic

SEQ ID NO: 1423 - protein, 8 aa, synthetic construct
  REGION 1..8: note = synthetic
GYTFTTYG

SEQ ID NO: 1424 - protein, 8 aa, synthetic construct
  REGION 1..8: note = synthetic
INTYSGVS

SEQ ID NO: 1425 - protein, 16 aa, synthetic construct
  REGION 1..16: note = synthetic
ARLGMGSTTGAGYFDV

SEQ ID NO: 1426 - protein, 106 aa, synthetic construct
  REGION 1..106: note = synthetic
ENVLTQSPAIMSASLGEKVTLSCRASSSVNYMYWYQQKSDASPKLWIYYTSNLAPGVPARFSGSGSGNSYSLTISSVEGEDAATYYCQQFTSSPWTFGGGTKLEIK

SEQ ID NO: 1427 - protein, 5 aa, synthetic construct
  REGION 1..5: note = synthetic
SSVNY

SEQ ID NO: 1428 - skipped

SEQ ID NO: 1429 - protein, 9 aa, synthetic construct
  REGION 1..9: note = synthetic
QQFTSSPWT

SEQ ID NO: 1430 - protein, 114 aa, synthetic construct
  REGION 1..114: note = synthetic
EVQLQQSGPELVKPGASVKISCKASGYTFTDYSMNWVKQSHGKSLEWIGDITPNNGSPNYNQKFKDKATLTVDKSSSTVYMELRSLTSEDSAVYYCASLFFDYWGHGTTLTVSS

SEQ ID NO: 1431 - protein, 8 aa, synthetic construct
  REGION 1..8: note = synthetic
GYTFTDYS

SEQ ID NO: 1432 - protein, 8 aa, synthetic construct
  REGION 1..8: note = synthetic
ITPNNGSP

SEQ ID NO: 1433 - protein, 7 aa, synthetic construct
  REGION 1..7: note = synthetic
ASLFFDY

SEQ ID NO: 1434 - protein, 113 aa, synthetic construct
  REGION 1..113: note = synthetic
DIVMTQSPSSLSVSAGEKVTMSCKSSQSLLNSGNQKNYLAWYQQKPGQPPKLLIYGASTRDSGVPDRFTGSGSGTDFTLTITSVQAEDLAVYYCQNDHTYPYTFGGGTKLEIK

SEQ ID NO: 1435 - protein, 12 aa, synthetic construct
  REGION 1..12: note = synthetic
QSLLNSGNQKNY

SEQ ID NO: 1436 - skipped

SEQ ID NO: 1437 - protein, 9 aa, synthetic construct
  REGION 1..9: note = synthetic
QNDHTYPYT

SEQ ID NO: 1438 - protein, 120 aa, synthetic construct
  REGION 1..120: note = synthetic
QVQLQQPGTELVKPGASVKLSCKASGFTFTTHWMHWVRQRPGQGLEWIGNIYPSNGGSNYNEKFKTKATLTVDRSSSTAYMHLSSLTSEDSAVYYCARRVNWDGYYFDYWGQGTTLTVSS

SEQ ID NO: 1439 - protein, 8 aa, synthetic construct
  REGION 1..8: note = synthetic
GFTFTTHW

SEQ ID NO: 1440 - protein, 8 aa, synthetic construct
  REGION 1..8: note = synthetic
IYPSNGGS

SEQ ID NO: 1441 - protein, 13 aa, synthetic construct
  REGION 1..13: note = synthetic
ARRVNWDGYYFDY

SEQ ID NO: 1442 - protein, 107 aa, synthetic construct
  REGION 1..107: note = synthetic
DIVMTQSQKFMSTSVGDRVSVTCKASQNVGTNVAWYQQKPGQSPKLLIYSASYRYSGVPDRFTGSGSGTDFTLTISNVQSEDLADYFCQQYNSYPLTFGGGTKLEIK

SEQ ID NO: 1443 - protein, 6 aa, synthetic construct
  REGION 1..6: note = synthetic
QNVGTN

SEQ ID NO: 1444 - skipped

SEQ ID NO: 1445 - protein, 9 aa, synthetic construct
  REGION 1..9: note = synthetic
QQYNSYPLT

SEQ ID NO: 1446 - protein, 118 aa, synthetic construct
  REGION 1..118: note = synthetic
QVQLQESGTELVKPGASVKLSCKASGYTFTSYWIHWVKQRPGQGLEWIGNINPSNGGTNYNEKFKSKAALTVDKSSSTAYMQLSSLTSEDSAVYYCARRGLPYFFDYWGQGTTLTVSS

SEQ ID NO: 1447 - protein, 8 aa, synthetic construct
  REGION 1..8: note = synthetic
GYTFTSYW

SEQ ID NO: 1448 - protein, 8 aa, synthetic construct
  REGION 1..8: note = synthetic
INPSNGGT

SEQ ID NO: 1449 - protein, 11 aa, synthetic construct
  REGION 1..11: note = synthetic
ARRGLPYFFDY

SEQ ID NO: 1450 - protein, 107 aa, synthetic construct
  REGION 1..107: note = synthetic
DIVMTQSQKFMSTSVGDRVSVTCKGSQNVGYNVAWYQQKPGQSPKALVYSASDRHSGVPDRFAGSGSGTDFTLTISNVQSEDLAEYFCQQYNSYPLTFGAGTKLELK

SEQ ID NO: 1451 - protein, 6 aa, synthetic construct
  REGION 1..6: note = synthetic
QNVGYN

SEQ ID NO: 1452 - skipped

SEQ ID NO: 1453 - protein, 9 aa, synthetic construct
  REGION 1..9: note = synthetic
QQYNSYPLT

SEQ ID NO: 1454 - protein, 120 aa, synthetic construct; identical to SEQ ID NO: 260
  REGION 1..120: note = synthetic

SEQ ID NO: 1455 - protein, 8 aa, synthetic construct
  REGION 1..8: note = synthetic
GYTFTDYN

SEQ ID NO: 1456 - protein, 8 aa, synthetic construct
  REGION 1..8: note = synthetic
IYPYIGGS

SEQ ID NO: 1457 - protein, 13 aa, synthetic construct
  REGION 1..13: note = synthetic
AREDKTARNAMDY

SEQ ID NO: 1458 - protein, 107 aa, synthetic construct
  REGION 1..107: note = synthetic
DIQMTQSPSSLSASVGDRVTITCRVSENIYDVLAWYQQKPGKAPKLLIYEATNLAEGVPSRFSGSGSGTDFTLTISSLQPEDFATYYCQHFWGTPYTFGQGTKLEIK

SEQ ID NO: 1459 - protein, 6 aa, synthetic construct
  REGION 1..6: note = synthetic
ENIYDV

SEQ ID NO: 1460 - skipped

SEQ ID NO: 1461 - protein, 9 aa, synthetic construct
  REGION 1..9: note = synthetic
QHFWGTPYT

SEQ ID NO: 1462 - protein, 120 aa, synthetic construct
  REGION 1..120: note = synthetic
EVQLQQSGAELVRSGASVKMSCKVNDYTFTNYNMHWLRQTPGQGLEWIGYIYPGNGDTNYNQKFKGKATLTADTSSSTAYMQIISLTSEDPAVYFCARQGIHYYYIDVWGAGTTVTVSSG

SEQ ID NO: 1463 - protein, 10 aa, synthetic construct
  REGION 1..10: note = synthetic
DYTFTNYNMH

SEQ ID NO: 1464 - protein, 13 aa, synthetic construct
  REGION 1..13: note = synthetic
YIYPGNGDTNYNQ

SEQ ID NO: 1465 - protein, 10 aa, synthetic construct
  REGION 1..10: note = synthetic
QGIHYYYIDV

SEQ ID NO: 1466 - protein, 110 aa, synthetic construct
  REGION 1..110: note = synthetic
DIEMTQSPATLSVTPGDRVSLSCRASQSIRDYLHWYQQKSHESPRLLIKYVSQSISGIPSRFSGSGSGSEFTLSINSVEPEDVGVYYCQNGHSLPLTFGSGTKLEIKRTV

SEQ ID NO: 1467 - protein, 11 aa, synthetic construct
  REGION 1..11: note = synthetic
RASQSIRDYLH

SEQ ID NO: 1468 - protein, 7 aa, synthetic construct
  REGION 1..7: note = synthetic
YVSQSIS

SEQ ID NO: 1469 - protein, 9 aa, synthetic construct
  REGION 1..9: note = synthetic
QNGHSLPLT

SEQ ID NO: 1470 - protein, 118 aa, synthetic construct
  REGION 1..118: note = synthetic
QVQLQQSGAELAKPGASVKMSCKASGYTFTSDWMHWVKQRPGQGLEWIGYINPSTGYTEYNQKFKDKATLTADKSSSTAYMQLRSLTSEDSAVYYCARGSSGSWFAYWGQGTLVTVSA

SEQ ID NO: 1471 - protein, 5 aa, synthetic construct
  REGION 1..5: note = synthetic
SDWMH

SEQ ID NO: 1472 - protein, 17 aa, synthetic construct
  REGION 1..17: note = synthetic
YINPSTGYTEYNQKFKD

SEQ ID NO: 1473 - protein, 9 aa, synthetic construct
  REGION 1..9: note = synthetic
GSSGSWFAY

SEQ ID NO: 1474 - protein, 111 aa, synthetic construct
  REGION 1..111: note = synthetic
DIVLTQSPASLAVSLGQRATISCRASQSVSTSSYSYMHWYQQKPGQPPKLLIKYASNLESGVPARFSGSGSGTDFTLNIHPVEEEDTATYYCQHSWEIPYTFGGGTKLEIK

SEQ ID NO: 1475 - protein, 15 aa, synthetic construct
  REGION 1..15: note = synthetic
RASQSVSTSSYSYMH

SEQ ID NO: 1476 - protein, 7 aa, synthetic construct
  REGION 1..7: note = synthetic
YASNLES

SEQ ID NO: 1477 - protein, 9 aa, synthetic construct
  REGION 1..9: note = synthetic
QHSWEIPYT

SEQ ID NO: 1478 - protein, 118 aa, synthetic construct; identical to SEQ ID NO: 1470
  REGION 1..118: note = synthetic

SEQ ID NO: 1479 - protein, 5 aa, synthetic construct
  REGION 1..5: note = SYNTHETIC
SDWMH

SEQ ID NO: 1480 - protein, 17 aa, synthetic construct
  REGION 1..17: note = synthetic
YINPSTGYTEYNQKFKD

SEQ ID NO: 1481 - protein, 9 aa, synthetic construct
  REGION 1..9: note = synthetic
GSSGSWFAY

SEQ ID NO: 1482 - protein, 112 aa, synthetic construct
  REGION 1..112: note = synthetic
DVVMTQTPLTLSVTIGQPASISCKSSQSLLNSDGKTYLNWLLQRPGQSPKRLIYLVSKLDSGVPDRFTGSGSGTDFTLKISRVEAEDLGVYYCWQGTHFPRTFGGGTKLEIK

SEQ ID NO: 1483 - protein, 16 aa, synthetic construct
  REGION 1..16: note = synthetic
KSSQSLLNSDGKTYLN

SEQ ID NO: 1484 - protein, 7 aa, synthetic construct
  REGION 1..7: note = synthetic
LVSKLDS

SEQ ID NO: 1485 - protein, 9 aa, synthetic construct
  REGION 1..9: note = synthetic
WQGTHFPRT

SEQ ID NO: 1486 - protein, 114 aa, synthetic construct
  REGION 1..114: note = synthetic
EVQLQQSVAELVRPGTSVTISCKASGYTFTNYWLGWVKQRPGHGLEWIGDIFPGGDYPNYNEKFKGKATLTADTSSSTAYMQLSSLTSEDSSVYFCTRGYFDVWGAGTTVTVSS

SEQ ID NO: 1487 - protein, 6 aa, synthetic construct
  REGION 1..6: note = synthetic
TNYWLG

SEQ ID NO: 1488 - protein, 17 aa, synthetic construct
  REGION 1..17: note = synthetic
DIFPGGDYPNYNEKFKG

SEQ ID NO: 1489 - protein, 7 aa, synthetic construct
  REGION 1..7: note = synthetic
TRGYFDV

SEQ ID NO: 1490 - protein, 114 aa, synthetic construct
  REGION 1..114: note = synthetic
DIQMTQSPSSLSVSAGEKVTMSCKSSQSLLNSENQKNYLAWFQQKPGQPPKMLIYGASTRESGVPDRFTGSGSGTDFTLTISSVQAEDLAVYYCQNDHSYPFTFGSGTKLEIKR

SEQ ID NO: 1491 - protein, 17 aa, synthetic construct
  REGION 1..17: note = synthetic
KSSQSLLNSENQKNYLA

SEQ ID NO: 1492 - protein, 7 aa, synthetic construct
  REGION 1..7: note = synthetic
GASTRES

SEQ ID NO: 1493 - protein, 7 aa, synthetic construct
  REGION 1..7: note = synthetic
QNDHSYP

SEQ ID NO: 1494 - protein, 120 aa, synthetic construct; identical to SEQ ID NO: 1462
  REGION 1..120: note = synthetic

SEQ ID NO: 1495 - protein, 10 aa, synthetic construct
  REGION 1..10: note = synthetic
DYTFTNYNMH

SEQ ID NO: 1496 - protein, 13 aa, synthetic construct
  REGION 1..13: note = synthetic
YIYPGNGDTNYNQ

SEQ ID NO: 1497 - protein, 10 aa, synthetic construct
  REGION 1..10: note = synthetic
QGIHYYYIDV

SEQ ID NO: 1498 - protein, 110 aa, synthetic construct; identical to SEQ ID NO: 1466
  REGION 1..110: note = synthetic

SEQ ID NO: 1499 - protein, 11 aa, synthetic construct
  REGION 1..11: note = synthetic
RASQSIRDYLH

SEQ ID NO: 1500 - protein, 7 aa, synthetic construct
  REGION 1..7: note = synthetic
YVSQSIS

SEQ ID NO: 1501 - protein, 9 aa, synthetic construct
  REGION 1..9: note = synthetic
QNGHSLPLT

SEQ ID NO: 1502 - protein, 118 aa, synthetic construct; identical to SEQ ID NO: 1470
  REGION 1..118: note = synthetic

SEQ ID NO: 1503 - protein, 5 aa, synthetic construct
  REGION 1..5: note = synthetic
SDWMH

SEQ ID NO: 1504 - protein, 17 aa, synthetic construct
  REGION 1..17: note = synthetic
YINPSTGYTEYNQKFKD

SEQ ID NO: 1505 - protein, 9 aa, synthetic construct
  REGION 1..9: note = synthetic
GSSGSWFAY

SEQ ID NO: 1506 - protein, 111 aa, synthetic construct; identical to SEQ ID NO: 1474
  REGION 1..111: note = synthetic

SEQ ID NO: 1507 - protein, 15 aa, synthetic construct
  REGION 1..15: note = synthetic
RASQSVSTSSYSYMH

SEQ ID NO: 1508 - protein, 7 aa, synthetic construct
  REGION 1..7: note = synthetic
YASNLES

SEQ ID NO: 1509 - protein, 9 aa, synthetic construct
  REGION 1..9: note = synthetic
QHSWEIPYT

SEQ ID NO: 1510 - protein, 118 aa, synthetic construct; identical to SEQ ID NO: 1470
  REGION 1..118: note = synthetic

SEQ ID NO: 1511 - protein, 5 aa, synthetic construct
  REGION 1..5: note = synthetic
SDWMH

SEQ ID NO: 1512 - protein, 17 aa, synthetic construct
  REGION 1..17: note = synthetic
YINPSTGYTEYNQKFKD

SEQ ID NO: 1513 - protein, 9 aa, synthetic construct
  REGION 1..9: note = synthetic
GSSGSWFAY

SEQ ID NO: 1514 - protein, 112 aa, synthetic construct; identical to SEQ ID NO: 1482
  REGION 1..112: note = synthetic

SEQ ID NO: 1515 - protein, 16 aa, synthetic construct
  REGION 1..16: note = synthetic
KSSQSLLNSDGKTYLN

SEQ ID NO: 1516 - protein, 7 aa, synthetic construct
  REGION 1..7: note = synthetic
LVSKLDS

SEQ ID NO: 1517 - protein, 9 aa, synthetic construct
  REGION 1..9: note = synthetic
WQGTHFPRT

SEQ ID NO: 1518 - protein, 114 aa, synthetic construct; identical to SEQ ID NO: 1486
  REGION 1..114: note = synthetic

SEQ ID NO: 1519 - protein, 6 aa, synthetic construct
  REGION 1..6: note = synthetic
TNYWLG

SEQ ID NO: 1520 - protein, 17 aa, synthetic construct
  REGION 1..17: note = synthetic
DIFPGGDYPNYNEKFKG

SEQ ID NO: 1521 - protein, 7 aa, synthetic construct
  REGION 1..7: note = synthetic
TRGYFDV

SEQ ID NO: 1522 - protein, 114 aa, synthetic construct; identical to SEQ ID NO: 1490
  REGION 1..114: note = synthetic

SEQ ID NO: 1523 - protein, 17 aa, synthetic construct
  REGION 1..17: note = synthetic
KSSQSLLNSENQKNYLA

SEQ ID NO: 1524 - protein, 7 aa, synthetic construct
  REGION 1..7: note = synthetic
GASTRES

SEQ ID NO: 1525 - protein, 7 aa, synthetic construct
  REGION 1..7: note = synthetic
QNDHSYP

SEQ ID NO: 1526 - protein, 8 aa, synthetic construct
  REGION 1..8: note = synthetic
GGTFSSYA

SEQ ID NO: 1527 - protein, 8 aa, synthetic construct
  REGION 1..8: note = synthetic
GGTFSSSA

SEQ ID NO: 1528 - protein, 8 aa, synthetic construct
  REGION 1..8: note = synthetic
GFSLSHFS

SEQ ID NO: 1529 - protein, 8 aa, synthetic construct
  REGION 1..8: note = synthetic
GYTLTELS

SEQ ID NO: 1530 - protein, 8 aa, synthetic construct
  REGION 1..8: note = synthetic
GGTFSSSA

SEQ ID NO: 1531 - protein, 8 aa, synthetic construct
  REGION 1..8: note = synthetic
GGTFGTYA

SEQ ID NO: 1532 - protein, 10 aa, synthetic construct
  REGION 1..10: note = synthetic
GGSISSSSYY

SEQ ID NO: 1533 - protein, 9 aa, synthetic construct
  REGION 1..9: note = synthetic
SGSISSTNW

SEQ ID NO: 1534 - protein, 8 aa, synthetic construct
  REGION 1..8: note = synthetic
GYTLTELS

SEQ ID NO: 1535 - protein, 8 aa, synthetic construct
  REGION 1..8: note = synthetic
GFTFSSYA

SEQ ID NO: 1536 - protein, 8 aa, synthetic construct
  REGION 1..8: note = synthetic
GYTLTELS

SEQ ID NO: 1537 - protein, 8 aa, synthetic construct
  REGION 1..8: note = synthetic
GFTFSSYA

SEQ ID NO: 1538 - protein, 8 aa, synthetic construct
  REGION 1..8: note = synthetic
GYTLTELS

SEQ ID NO: 1539 - protein, 8 aa, synthetic construct
  REGION 1..8: note = synthetic
GYTLTELS

SEQ ID NO: 1540 - protein, 8 aa, synthetic construct
  REGION 1..8: note = synthetic
GFTFSSYG

SEQ ID NO: 1541 - protein, 8 aa, synthetic construct
  REGION 1..8: note = synthetic
IIPIFGTA

SEQ ID NO: 1542 - protein, 8 aa, synthetic construct
  REGION 1..8: note = synthetic
IIPIYGIT

SEQ ID NO: 1543 - protein, 8 aa, synthetic construct
  REGION 1..8: note = synthetic
FDPEEGGT

SEQ ID NO: 1544 - protein, 8 aa, synthetic construct
  REGION 1..8: note = synthetic
FDPEDGET

SEQ ID NO: 1545 - protein, 8 aa, synthetic construct
  REGION 1..8: note = synthetic
IIPIYGIT

SEQ ID NO: 1546 - protein, 8 aa, synthetic construct
  REGION 1..8: note = synthetic
ITPISATI

SEQ ID NO: 1547 - protein, 7 aa, synthetic construct
  REGION 1..7: note = synthetic
IYYSGST

SEQ ID NO: 1548 - protein, 7 aa, synthetic construct
  REGION 1..7: note = synthetic
IYHSGST

SEQ ID NO: 1549 - protein, 8 aa, synthetic construct
  REGION 1..8: note = synthetic
FDPEDGET

SEQ ID NO: 1550 - protein, 8 aa, synthetic construct
  REGION 1..8: note = synthetic
ISYDGSNK

SEQ ID NO: 1551 - protein, 8 aa, synthetic construct
  REGION 1..8: note = synthtetic
FDPEDGET

SEQ ID NO: 1552 - protein, 8 aa, synthetic construct
  REGION 1..8: note = synthetic
ISYDGSNK

SEQ ID NO: 1553 - protein, 8 aa, synthetic construct
  REGION 1..8: note = synthetic
FDPEDGET

SEQ ID NO: 1554 - protein, 8 aa, synthetic construct
  REGION 1..8: note = synthetic
FDPEDGET

SEQ ID NO: 1555 - protein, 8 aa, synthetic construct
  REGION 1..8: note = synthetic
IRYDGSNK

SEQ ID NO: 1556 - protein, 13 aa, synthetic construct
  REGION 1..13: note = synthetic
AREEVSSPYGMDV

SEQ ID NO: 1557 - protein, 22 aa, synthetic construct
  REGION 1..22: note = synthetic
ARDDTARRVRGVPYYYYYAMDV

SEQ ID NO: 1558 - protein, 14 aa, synthetic construct
  REGION 1..14: note = synthetic
ATGIWYSSGWPVDY

SEQ ID NO: 1559 - protein, 18 aa, synthetic construct
  REGION 1..18: note = synthetic
ATVSRVRGVINYYYYMDV

SEQ ID NO: 1560 - protein, 22 aa, synthetic construct
  REGION 1..22: note = synthetic
ARDDTARRVRGVPYYYYYAMDV

SEQ ID NO: 1561 - protein, 13 aa, synthetic construct
  REGION 1..13: note = synthetic
ARGFEYSDGLLDD

SEQ ID NO: 1562 - protein, 15 aa, synthetic construct
  REGION 1..15: note = synthetic
ARGAWELRLGDWFDP

SEQ ID NO: 1563 - protein, 10 aa, synthetic construct
  REGION 1..10: note = synthetic
ARVGPAAIYY

SEQ ID NO: 1564 - protein, 21 aa, synthetic construct
  REGION 1..21: note = synthetic
ATAKPGIAVAGQNYYYYYMDV

SEQ ID NO: 1565 - protein, 17 aa, synthetic construct
  REGION 1..17: note = synthetic
ASSPIGYSYGYWGGMDV

SEQ ID NO: 1566 - protein, 17 aa, synthetic construct
  REGION 1..17: note = synthetic
ATGPAAAGVGYYYYMDV

SEQ ID NO: 1567 - protein, 20 aa, synthetic construct
  REGION 1..20: note = synthetic
ARDVMVYCSSTSCYFYGMDV

SEQ ID NO: 1568 - protein, 18 aa, synthetic construct
  REGION 1..18: note = synthetic
ATGGYSSGFNYYYYYMDV

SEQ ID NO: 1569 - protein, 14 aa, synthetic construct
  REGION 1..14: note = synthetic
ATGVTTYYYYGMDV

SEQ ID NO: 1570 - protein, 14 aa, synthetic construct
  REGION 1..14: note = synthetic
ARDLFDFWWDGMDV

SEQ ID NO: 1571 - protein, 9 aa, synthetic construct
  REGION 1..9: note = synthetic
TGAVTSGHY

SEQ ID NO: 1572 - protein, 6 aa, synthetic construct
  REGION 1..6: note = synthetic
QGIGNY

SEQ ID NO: 1573 - protein, 11 aa, synthetic construct
  REGION 1..11: note = synthetic
QSLLDSSGYNY

SEQ ID NO: 1574 - protein, 11 aa, synthetic construct
  REGION 1..11: note = synthetic
QSLLYRNGNNY

SEQ ID NO: 1575 - protein, 6 aa, synthetic construct
  REGION 1..6: note = synthetic
QSVDSS

SEQ ID NO: 1576 - protein, 12 aa, synthetic construct
  REGION 1..12: note = synthetic
QSLFYSDDGNTY

SEQ ID NO: 1577 - protein, 9 aa, synthetic construct
  REGION 1..9: note = synthetic
SSNIGAGYD

SEQ ID NO: 1578 - protein, 8 aa, synthetic construct
  REGION 1..8: note = synthetic
SNNVGYEG

SEQ ID NO: 1579 - protein, 11 aa, synthetic construct
  REGION 1..11: note = synthetic
QSLLYRNGNNY

SEQ ID NO: 1580 - protein, 9 aa, synthetic construct
  REGION 1..9: note = synthetic
SGIDVRTNK

SEQ ID NO: 1581 - protein, 11 aa, synthetic construct
  REGION 1..11: note = synthetic
QSLLYRNGYNY

SEQ ID NO: 1582 - protein, 6 aa, synthetic construct
  REGION 1..6: note = synthetic
QDIRDY

SEQ ID NO: 1583 - protein, 11 aa, synthetic construct
  REGION 1..11: note = synthetic
QSLLYRNGNNY

SEQ ID NO: 1584 - protein, 11 aa, synthetic construct
  REGION 1..11: note = synthetic
QSLLYSNGNNF

SEQ ID NO: 1585 - protein, 7 aa, synthetic construct
  REGION 1..7: note = synthetic
QSVSSMY

SEQ ID NO: 1586-1594 - skipped (9 entries)

SEQ ID NO: 1595 - protein, 7 aa, synthetic construct
  REGION 1..7: note = synthetic
FQSDSDK

SEQ ID NO: 1596-1600 - skipped (5 entries)

SEQ ID NO: 1601 - protein, 10 aa, synthetic construct
  REGION 1..10: note = synthetic
LLSYSGASWV

SEQ ID NO: 1602 - protein, 9 aa, synthetic construct
  REGION 1..9: note = synthetic
QQLKDYPIT

SEQ ID NO: 1603 - protein, 9 aa, synthetic construct
  REGION 1..9: note = synthetic
MQALQTPIT

SEQ ID NO: 1604 - protein, 9 aa, synthetic construct
  REGION 1..9: note = synthetic
MQALQTPPT

SEQ ID NO: 1605 - protein, 9 aa, synthetic construct
  REGION 1..9: note = synthetic
QQYKDWPFT

SEQ ID NO: 1606 - protein, 9 aa, synthetic construct
  REGION 1..9: note = synthetic
MQHMEFPLT

SEQ ID NO: 1607 - protein, 12 aa, synthetic construct
  REGION 1..12: note = synthetic
QSYDSSLSIYVV

SEQ ID NO: 1608 - protein, 11 aa, synthetic construct
  REGION 1..11: note = synthetic
SAWDSSLNAVV

SEQ ID NO: 1609 - protein, 9 aa, synthetic construct
  REGION 1..9: note = synthetic
MQALQTPPT

SEQ ID NO: 1610 - protein, 9 aa, synthetic construct
  REGION 1..9: note = synthetic
LIWHTSGWV

SEQ ID NO: 1611 - protein, 9 aa, synthetic construct
  REGION 1..9: note = synthetic
MQALQTPPT

SEQ ID NO: 1612 - protein, 9 aa, synthetic construct
  REGION 1..9: note = synthetic
QQFENLPIT

SEQ ID NO: 1613 - protein, 9 aa, synthetic construct
  REGION 1..9: note = synthetic
MQALQTPPT

SEQ ID NO: 1614 - protein, 9 aa, synthetic construct
  REGION 1..9: note = synthetic
MQALQTPPT

SEQ ID NO: 1615 - protein, 10 aa, synthetic construct
  REGION 1..10: note = synthetic
QQYVSSPMYT

SEQ ID NO: 1616 - protein, 8 aa, synthetic construct
  REGION 1..8: note = synthetic
GGTFSSSA

SEQ ID NO: 1617 - protein, 8 aa, synthetic construct
  REGION 1..8: note = synthetic
GGTFNNYG

SEQ ID NO: 1618 - protein, 8 aa, synthetic construct
  REGION 1..8: note = synthetic
GYTLTELS

SEQ ID NO: 1619 - protein, 10 aa, synthetic construct
  REGION 1..10: note = synthetic
GGSISNSNYY

SEQ ID NO: 1620 - protein, 8 aa, synthetic construct
  REGION 1..8: note = synthetic
GGTFSSSA

SEQ ID NO: 1621 - protein, 8 aa, synthetic construct
  REGION 1..8: note = synthetic
GFTFGTSS

SEQ ID NO: 1622 - protein, 8 aa, synthetic construct
  REGION 1..8: note = synthetic
GYTLTELS

SEQ ID NO: 1623 - protein, 8 aa, synthetic construct
  REGION 1..8: note = synthetic
GYTLTELS

SEQ ID NO: 1624 - protein, 8 aa, synthetic construct
  REGION 1..8: note = synthetic
GGTFSSYA

SEQ ID NO: 1625 - protein, 10 aa, synthetic construct
  REGION 1..10: note = synthetic
GFSLTSGGMS

SEQ ID NO: 1626 - protein, 8 aa, synthetic construct
  REGION 1..8: note = synthetic
GYTFTAYY

SEQ ID NO: 1627 - protein, 8 aa, synthetic construct
  REGION 1..8: note = synthetic
GYTFTNYY

SEQ ID NO: 1628 - protein, 10 aa, synthetic construct
  REGION 1..10: note = synthetic
GGSISSSSYY

SEQ ID NO: 1629 - protein, 8 aa, synthetic construct
  REGION 1..8: note = synthetic
GFTFDDYA

SEQ ID NO: 1630 - protein, 8 aa, synthetic construct
  REGION 1..8: note = synthetic
RFTFEDYA

SEQ ID NO: 1631 - protein, 8 aa, synthetic construct
  REGION 1..8: note = synthetic
IIPIYGIT

SEQ ID NO: 1632 - protein, 8 aa, synthetic construct
  REGION 1..8: note = synthetic
IIPLFGTT

SEQ ID NO: 1633 - protein, 8 aa, synthetic construct
  REGION 1..8: note = synthetic
FDPEDGET

SEQ ID NO: 1634 - protein, 7 aa, synthetic construct
  REGION 1..7: note = synthetic
IYYSGST

SEQ ID NO: 1635 - protein, 8 aa, synthetic construct
  REGION 1..8: note = synthetic
IIPIYGIT

SEQ ID NO: 1636 - protein, 8 aa, synthetic construct
  REGION 1..8: note = synthetic
ISFDGTEI

SEQ ID NO: 1637 - protein, 8 aa, synthetic construct
  REGION 1..8: note = synthetic
FDPEDGET

SEQ ID NO: 1638 - protein, 8 aa, synthetic construct
  REGION 1..8: note = synthetic
FDPEDGET

SEQ ID NO: 1639 - protein, 8 aa, synthetic construct
  REGION 1..8: note = synthetic
IIPIFGTA

SEQ ID NO: 1640 - protein, 7 aa, synthetic construct
  REGION 1..7: note = synthetic
IDWNDDK

SEQ ID NO: 1641 - protein, 8 aa, synthetic construct
  REGION 1..8: note = synthetic
INPNSGGT

SEQ ID NO: 1642 - protein, 8 aa, synthetic construct
  REGION 1..8: note = synthetic
INPSGGIT

SEQ ID NO: 1643 - protein, 7 aa, synthetic construct
  REGION 1..7: note = synthetic
IYYSGST

SEQ ID NO: 1644 - protein, 8 aa, synthetic construct
  REGION 1..8: note = synthetic
ISWNSGSI

SEQ ID NO: 1645 - protein, 8 aa, synthetic construct
  REGION 1..8: note = synthetic
ISWKSGGI

SEQ ID NO: 1646 - protein, 22 aa, synthetic construct
  REGION 1..22: note = synthetic
ARDDTARRVRGVPYYYYYAMDV

SEQ ID NO: 1647 - protein, 15 aa, synthetic construct
  REGION 1..15: note = synthetic
ARDRMAADGMAVFDY

SEQ ID NO: 1648 - protein, 19 aa, synthetic construct
  REGION 1..19: note = synthetic
ATEVPMVRGARRYYYYMDV

SEQ ID NO: 1649 - protein, 15 aa, synthetic construct
  REGION 1..15: note = synthetic
ARGAWELSLGDWFDP

SEQ ID NO: 1650 - protein, 22 aa, synthetic construct
  REGION 1..22: note = synthetic
ARDDTARRVRGVPYYYYYAMDV

SEQ ID NO: 1651 - protein, 15 aa, synthetic construct
  REGION 1..15: note = synthetic
AKGSGNIYFYSGMDV

SEQ ID NO: 1652 - protein, 19 aa, synthetic construct
  REGION 1..19: note = synthetic
ATGVPAAIGVYYYYYYMDV

SEQ ID NO: 1653 - protein, 20 aa, synthetic construct
  REGION 1..20: note = synthetic
ATDSRDGPAARGGYYYYMDV

SEQ ID NO: 1654 - protein, 20 aa, synthetic construct
  REGION 1..20: note = synthetic
ARDAYYYDSSGYYNPDAFDI

SEQ ID NO: 1655 - protein, 12 aa, synthetic construct
  REGION 1..12: note = synthetic
ARIRGMTWGFDS

SEQ ID NO: 1656 - protein, 21 aa, synthetic construct
  REGION 1..21: note = synthetic
ARDGAFYYGSENYYNAGWFDP

SEQ ID NO: 1657 - protein, 18 aa, synthetic construct
  REGION 1..18: note = synthetic
ARAGLGYNWNYAPSGMDV

SEQ ID NO: 1658 - protein, 15 aa, synthetic construct
  REGION 1..15: note = synthetic
ARGAWELRLGDWFDP

SEQ ID NO: 1659 - protein, 15 aa, synthetic construct
  REGION 1..15: note = synthetic
AKDVNRILVAGMVDY

SEQ ID NO: 1660 - protein, 15 aa, synthetic construct
  REGION 1..15: note = synthetic
VKDPTLVATDRAFNI

SEQ ID NO: 1661 - protein, 6 aa, synthetic construct
  REGION 1..6: note = synthetic
QSVSSY

SEQ ID NO: 1662 - protein, 8 aa, synthetic construct
  REGION 1..8: note = synthetic
SSNIGRHF

SEQ ID NO: 1663 - protein, 11 aa, synthetic construct
  REGION 1..11: note = synthetic
QTLLYINENNY

SEQ ID NO: 1664 - protein, 9 aa, synthetic construct
  REGION 1..9: note = synthetic
SSNIGAGYD

SEQ ID NO: 1665 - protein, 6 aa, synthetic construct
  REGION 1..6: note = synthetic
QNVYGE

SEQ ID NO: 1666 - protein, 6 aa, synthetic construct
  REGION 1..6: note = synthetic
QSISGW

SEQ ID NO: 1667 - protein, 11 aa, synthetic construct
  REGION 1..11: note = synthetic
QSLLYSNGYNY

SEQ ID NO: 1668 - protein, 11 aa, synthetic construct
  REGION 1..11: note = synthetic
QSLLYINGYNY

SEQ ID NO: 1669 - protein, 11 aa, synthetic construct
  REGION 1..11: note = synthetic
QSLLHSNGYNY

SEQ ID NO: 1670 - protein, 7 aa, synthetic construct
  REGION 1..7: note = synthetic
QSVSSSY

SEQ ID NO: 1671 - protein, 11 aa, synthetic construct
  REGION 1..11: note = synthetic
QSLLSGNGYNY

SEQ ID NO: 1672 - protein, 9 aa, synthetic construct
  REGION 1..9: note = synthetic
SSDVGGYNY

SEQ ID NO: 1673 - protein, 9 aa, synthetic construct
  REGION 1..9: note = synthetic
SSNIGAGYD

SEQ ID NO: 1674 - protein, 11 aa, synthetic construct
  REGION 1..11: note = synthetic
QSLLHSNGYNY

SEQ ID NO: 1675 - protein, 11 aa, synthetic construct
  REGION 1..11: note = synthetic
QSLLHSNGYNY

SEQ ID NO: 1676-1690 - skipped (15 entries)

SEQ ID NO: 1691 - protein, 9 aa, synthetic construct
  REGION 1..9: note = synthetic
QQYDDWPQT

SEQ ID NO: 1692 - protein, 11 aa, synthetic construct
  REGION 1..11: note = synthetic
SSWDAALNGVV

SEQ ID NO: 1693 - protein, 9 aa, synthetic construct
  REGION 1..9: note = synthetic
MQGLQTPPT

SEQ ID NO: 1694 - protein, 12 aa, synthetic construct
  REGION 1..12: note = synthetic
QSYDSSLSVYVV

SEQ ID NO: 1695 - protein, 9 aa, synthetic construct
  REGION 1..9: note = synthetic
QQRRDWPIT

SEQ ID NO: 1696 - protein, 9 aa, synthetic construct
  REGION 1..9: note = synthetic
QQYYSYPLT

SEQ ID NO: 1697 - protein, 9 aa, synthetic construct
  REGION 1..9: note = synthetic
MQALQSPVT

SEQ ID NO: 1698 - protein, 9 aa, synthetic construct
  REGION 1..9: note = synthetic
MQALQTPPT

SEQ ID NO: 1699 - protein, 9 aa, synthetic construct
  REGION 1..9: note = synthetic
MQGLQTPRT

SEQ ID NO: 1700 - protein, 9 aa, synthetic construct
  REGION 1..9: note = synthetic
QQYGTTPFA

SEQ ID NO: 1701 - protein, 9 aa, synthetic construct
  REGION 1..9: note = synthetic
MQALKSPLT

SEQ ID NO: 1702 - protein, 10 aa, synthetic construct
  REGION 1..10: note = synthetic
SSYAGSNNLV

SEQ ID NO: 1703 - protein, 12 aa, synthetic construct
  REGION 1..12: note = synthetic
QSYDSSLSVYVV

SEQ ID NO: 1704 - protein, 9 aa, synthetic construct
  REGION 1..9: note = synthetic
MQGLQTPIT

SEQ ID NO: 1705 - protein, 9 aa, synthetic construct
  REGION 1..9: note = synthetic
MQYLQTPDT

SEQ ID NO: 1706 - protein, 8 aa, synthetic construct
  REGION 1..8: note = synthetic
GGTFSSSA

SEQ ID NO: 1707 - protein, 8 aa, synthetic construct
  REGION 1..8: note = synthetic
GFTFSSYG

SEQ ID NO: 1708 - protein, 8 aa, synthetic construct
  REGION 1..8: note = synthetic
GGTFSSSA

SEQ ID NO: 1709 - protein, 8 aa, synthetic construct
  REGION 1..8: note = synthetic
GYTLTELS

SEQ ID NO: 1710 - protein, 8 aa, synthetic construct
  REGION 1..8: note = synthetic
GYMFTNYP

SEQ ID NO: 1711 - protein, 8 aa, synthetic construct
  REGION 1..8: note = synthetic
GGTFSSSA

SEQ ID NO: 1712 - protein, 8 aa, synthetic construct
  REGION 1..8: note = synthetic
TYTFTTYY

SEQ ID NO: 1713 - protein, 8 aa, synthetic construct
  REGION 1..8: note = synthetic
GGTFSSSA

SEQ ID NO: 1714 - protein, 8 aa, synthetic construct
  REGION 1..8: note = synthetic
GFNFRGYA

SEQ ID NO: 1715 - protein, 8 aa, synthetic construct
  REGION 1..8: note = synthetic
GYTLTELS

SEQ ID NO: 1716 - protein, 8 aa, synthetic construct
  REGION 1..8: note = synthetic
GGTFSSSA

SEQ ID NO: 1717 - protein, 8 aa, synthetic construct
  REGION 1..8: note = synthetic
GGTFSSSA

SEQ ID NO: 1718 - protein, 8 aa, synthetic construct
  REGION 1..8: note = synthetic
GGTFSSYA

SEQ ID NO: 1719 - protein, 8 aa, synthetic construct
  REGION 1..8: note = synthetic
GGTFSSSA

SEQ ID NO: 1720 - protein, 8 aa, synthetic construct
  REGION 1..8: note = synthetic
GYTLTELS

SEQ ID NO: 1721 - protein, 8 aa, synthetic construct
  REGION 1..8: note = synthetic
GGTFSSSA

SEQ ID NO: 1722 - protein, 8 aa, synthetic construct
  REGION 1..8: note = synthetic
IIPIYGIT

SEQ ID NO: 1723 - protein, 8 aa, synthetic construct
  REGION 1..8: note = synthetic
ISYDGSNK

SEQ ID NO: 1724 - protein, 8 aa, synthetic construct
  REGION 1..8: note = synthetic
IIPIYGIT

SEQ ID NO: 1725 - protein, 8 aa, synthetic construct
  REGION 1..8: note = synthetic
FDPEDGET

SEQ ID NO: 1726 - protein, 8 aa, synthetic construct
  REGION 1..8: note = synthetic
INAGTGNT

SEQ ID NO: 1727 - protein, 8 aa, synthetic construct
  REGION 1..8: note = synthetic
IIPIYGIT

SEQ ID NO: 1728 - protein, 8 aa, synthetic construct
  REGION 1..8: note = synthetic
IYPSGGNT

SEQ ID NO: 1729 - protein, 8 aa, synthetic construct
  REGION 1..8: note = synthetic
IIPIYGIT

SEQ ID NO: 1730 - protein, 8 aa, synthetic construct
  REGION 1..8: note = synthetic
ISGSGGTT

SEQ ID NO: 1731 - protein, 8 aa, synthetic construct
  REGION 1..8: note = synthetic
FDPEDGET

SEQ ID NO: 1732 - protein, 8 aa, synthetic construct
  REGION 1..8: note = synthetic
IIPIYGIT

SEQ ID NO: 1733 - protein, 8 aa, synthetic construct
  REGION 1..8: note = synthetic
IIPIYGIT

SEQ ID NO: 1734 - protein, 8 aa, synthetic construct
  REGION 1..8: note = synthetic
IIPIFGTA

SEQ ID NO: 1735 - protein, 8 aa, synthetic construct
  REGION 1..8: note = synthetic
IIPIYGIT

SEQ ID NO: 1736 - protein, 8 aa, synthetic construct
  REGION 1..8: note = synthetic
FDPEDGET

SEQ ID NO: 1737 - protein, 8 aa, synthetic construct
  REGION 1..8: note = synthetic
IIPIYGIT

SEQ ID NO: 1738 - protein, 22 aa, synthetic construct
  REGION 1..22: note = synthetic
ARDDTARRVRGVPYYYYYAMDV

SEQ ID NO: 1739 - protein, 18 aa, synthetic construct
  REGION 1..18: note = synthetic
AKEDRLRFLEWLFYGMDV

SEQ ID NO: 1740 - protein, 22 aa, synthetic construct
  REGION 1..22: note = synthetic
ARDDTARRVRGVPYYYYYAMDV

SEQ ID NO: 1741 - protein, 19 aa, synthetic construct
  REGION 1..19: note = synthetic
ATEDPGPVAGPYYYYGMDV

SEQ ID NO: 1742 - protein, 21 aa, synthetic construct
  REGION 1..21: note = synthetic
AREGMFYYGLESYYKGGWFDP

SEQ ID NO: 1743 - protein, 22 aa, synthetic construct
  REGION 1..22: note = synthetic
ARDDTARRVRGVPYYYYYAMDV

SEQ ID NO: 1744 - protein, 13 aa, synthetic construct
  REGION 1..13: note = synthetic
VRDQNYYYSAMDV

SEQ ID NO: 1745 - protein, 22 aa, synthetic construct
  REGION 1..22: note = synthetic
ARDDTARRVRGVPYYYYYAMDV

SEQ ID NO: 1746 - protein, 15 aa, synthetic construct
  REGION 1..15: note = synthetic
AQSYAQIGYGGHIDH

SEQ ID NO: 1747 - protein, 19 aa, synthetic construct
  REGION 1..19: note = synthetic
ATGVPAAIGVYYYYYYMDV

SEQ ID NO: 1748 - protein, 22 aa, synthetic construct
  REGION 1..22: note = synthetic
ARDDTARRVRGVPYYYYYAMDV

SEQ ID NO: 1749 - protein, 22 aa, synthetic construct
  REGION 1..22: note = synthetic
ARDDTARRVRGVPYYYYYAMDV

SEQ ID NO: 1750 - protein, 20 aa, synthetic construct
  REGION 1..20: note = synthetic
ARDAYYYDSSGYYNPDAFDI

SEQ ID NO: 1751 - protein, 22 aa, synthetic construct
  REGION 1..22: note = synthetic
ARDDTARRVRGVPYYYYYAMDV

SEQ ID NO: 1752 - protein, 22 aa, synthetic construct
  REGION 1..22: note = synthetic
ATEVGYCSGGSCYISYYYGMDV

SEQ ID NO: 1753 - protein, 22 aa, synthetic construct
  REGION 1..22: note = synthetic
ARDDTARRVRGVPYYYYYAMDV

SEQ ID NO: 1754 - protein, 12 aa, synthetic construct
  REGION 1..12: note = synthetic
QSLLDSDDGNIH

SEQ ID NO: 1755 - protein, 6 aa, synthetic construct
  REGION 1..6: note = synthetic
HDIYTY

SEQ ID NO: 1756 - protein, 6 aa, synthetic construct
  REGION 1..6: note = synthetic
QDIDDD

SEQ ID NO: 1757 - protein, 11 aa, synthetic construct
  REGION 1..11: note = synthetic
QSLLYINGYHY

SEQ ID NO: 1758 - protein, 11 aa, synthetic construct
  REGION 1..11: note = synthetic
QSLLHRNGYNY

SEQ ID NO: 1759 - protein, 12 aa, synthetic construct
  REGION 1..12: note = synthetic
QSLLDSDDGNTY

SEQ ID NO: 1760 - protein, 6 aa, synthetic construct
  REGION 1..6: note = synthetic
QDIRNY

SEQ ID NO: 1761 - protein, 6 aa, synthetic construct
  REGION 1..6: note = synthetic
RDISDS

SEQ ID NO: 1762 - protein, 9 aa, synthetic construct
  REGION 1..9: note = synthetic
SGIDVATYM

SEQ ID NO: 1763 - protein, 11 aa, synthetic construct
  REGION 1..11: note = synthetic
QSLLYRNGYNY

SEQ ID NO: 1764 - protein, 6 aa, synthetic construct
  REGION 1..6: note = synthetic
QNIDSS

SEQ ID NO: 1765 - protein, 7 aa, synthetic construct
  REGION 1..7: note = synthet8c
QSVYNNY

SEQ ID NO: 1766 - protein, 11 aa, synthetic construct
  REGION 1..11: note = synthetic
QSLLYSNGYNY

SEQ ID NO: 1767 - protein, 6 aa, synthetic construct
  REGION 1..6: note = synthetic
ESVTTF

SEQ ID NO: 1768 - protein, 11 aa, synthetic construct
  REGION 1..11: note = synthetic
QSLLYRNGHNF

SEQ ID NO: 1769 - protein, 6 aa, synthetic construct
  REGION 1..6: note = synthetic
QTMNNY

SEQ ID NO: 1770-1777 - skipped (8 entries)

SEQ ID NO: 1778 - protein, 7 aa, synthetic construct
  REGION 1..7: note = synthetic
YKSDSDK

SEQ ID NO: 1779-1785 - skipped (7 entries)

SEQ ID NO: 1786 - protein, 9 aa, synthetic construct
  REGION 1..9: note = synthetic
MQRKEFPLT

SEQ ID NO: 1787 - protein, 11 aa, synthetic construct
  REGION 1..11: note = synthetic
QQYDNHPPEVT

SEQ ID NO: 1788 - protein, 9 aa, synthetic construct
  REGION 1..9: note = synthetic
LQHDNLPLT

SEQ ID NO: 1789 - protein, 9 aa, synthetic construct
  REGION 1..9: note = synthetic
MQALQTPPT

SEQ ID NO: 1790 - protein, 9 aa, synthetic construct
  REGION 1..9: note = synthetic
MQALQTPLT

SEQ ID NO: 1791 - protein, 9 aa, synthetic construct
  REGION 1..9: note = synthetic
MQRLQFPLT

SEQ ID NO: 1792 - protein, 9 aa, synthetic construct
  REGION 1..9: note = synthetic
QQFENLPIT

SEQ ID NO: 1793 - protein, 9 aa, synthetic construct
  REGION 1..9: note = synthetic
HQYDNLPLT

SEQ ID NO: 1794 - protein, 9 aa, synthetic construct
  REGION 1..9: note = synthetic
LIWHGSHYV

SEQ ID NO: 1795 - protein, 9 aa, synthetic construct
  REGION 1..9: note = synthetic
MQAVQNPPT

SEQ ID NO: 1796 - protein, 9 aa, synthetic construct
  REGION 1..9: note = synthetic
HQSSSLPLT

SEQ ID NO: 1797 - protein, 10 aa, synthetic construct
  REGION 1..10: note = synthetic
QQYNSWPPYT

SEQ ID NO: 1798 - protein, 9 aa, synthetic construct
  REGION 1..9: note = synthetic
MQARQTPYT

SEQ ID NO: 1799 - protein, 9 aa, synthetic construct
  REGION 1..9: note = synthetic
HQHTNWPLT

SEQ ID NO: 1800 - protein, 9 aa, synthetic construct
  REGION 1..9: note = synthetic
MQALQTPPT

SEQ ID NO: 1801 - protein, 10 aa, synthetic construct
  REGION 1..10: note = synthetic
QQYGDWLPIT

SEQ ID NO: 1802 - protein, 8 aa, synthetic construct
  REGION 1..8: note = synthetic
GYTLTELS

SEQ ID NO: 1803 - protein, 8 aa, synthetic construct
  REGION 1..8: note = synthetic
GGTFSSSA

SEQ ID NO: 1804 - protein, 8 aa, synthetic construct
  REGION 1..8: note = synthetic
GGTFSSYA

SEQ ID NO: 1805 - protein, 8 aa, synthetic construct
  REGION 1..8: note = synthetic
FDPEDGET

SEQ ID NO: 1806 - protein, 8 aa, synthetic construct
  REGION 1..8: note = synthetic
IIPIYGIT

SEQ ID NO: 1807 - protein, 8 aa, synthetic construct
IIPIFGTA

SEQ ID NO: 1808 - protein, 17 aa, synthetic construct
  REGION 1..17: note = synthetic
ATAFPEATISYYYYMDV

SEQ ID NO: 1809 - protein, 22 aa, synthetic construct
  REGION 1..22: note = synthetic
ARDDTARRVRGVPYYYYYAMDV

SEQ ID NO: 1810 - protein, 21 aa, synthetic construct
  REGION 1..21: note = synthetic
ARGPWYYDSSGYSSYAYYMDV

SEQ ID NO: 1811 - protein, 11 aa, synthetic construct
  REGION 1..11: note = synthetic
QSLLYRNGYNY

SEQ ID NO: 1812 - protein, 12 aa, synthetic construct
  REGION 1..12: note = synthetic
RSLLDSDDGNTH

SEQ ID NO: 1813 - protein, 11 aa, synthetic construct
  REGION 1..11: note = synthetic
QSLLHSDGYNY

SEQ ID NO: 1814-1816 - skipped (3 entries)

SEQ ID NO: 1817 - protein, 9 aa, synthetic construct
  REGION 1..9: note = synthetic
MQAVQNPPT

SEQ ID NO: 1818 - protein, 9 aa, synthetic construct
  REGION 1..9: note = synthetic
MQRKEFPLT

SEQ ID NO: 1819 - protein, 10 aa, synthetic construct
  REGION 1..10: note = synthetic
MQALHTPGVT

SEQ ID NO: 1820 - protein, 120 aa, synthetic construct
  REGION 1..120: note = synthetic
EVQLVLSGGGFVQPGGSLKLSCAASGFTFSSYAMSWVRQNPERRLVWVATITGGGRNTYYPDSVKGRFTISRDNAKNTLYLQMSSLRSEDTAMYYCTRQGYDGYTWFAYWGQGTLVTVSS

SEQ ID NO: 1821 - protein, 8 aa, synthetic construct
  REGION 1..8: note = synthetic
GFTFSSYA

SEQ ID NO: 1822 - protein, 8 aa, synthetic construct
  REGION 1..8: note = synthetic
ITGGGRNT

SEQ ID NO: 1823 - protein, 13 aa, synthetic construct
  REGION 1..13: note = synthetic
TRQGYDGYTWFAY

SEQ ID NO: 1824 - protein, 447 aa, synthetic construct
  REGION 1..447: note = synthetic
EVQLVLSGGGFVQPGGSLKLSCAASGFTFSSYAMSWVRQNPERRLVWVATITGGGRNTYYPDSVKGRFTISRDNAKNTLYLQMSSLRSEDTAMYYCTRQGYDGYTWFAYWGQGTLVTVSSASTKGPSVFPLAPCSRSTSESTAALGCLVKDYFPEPVTVSWNSGALTSGVHTFPAVLQSSGLYSLSSVVTVPSSSLGTKTYTCNVDHKPSNTKVDKRVESKYGPPCPPCPAPEFLGGPSVFLFPPKPKDTLMISRTPEVTCVVVDVSQEDPEVQFNWYVDGVEVHNAKTKPREEQFNSTYRVVSVLTVLHQDWLNGKEYKCKVSNKGLPSSIEKTISKAKGQPREPQVYTLPPSQEEMTKNQVSLTCLVKGFYPSDIAVEWESNGQPENNYKTTPPVLDSDGSFFLYSRLTVDKSRWQEGNVFSCSVMHEALHNHYTQKSLSLSPGK

SEQ ID NO: 1825 - protein, 112 aa, synthetic construct
  REGION 1..112: note = synthetic
DIVLTQSPTSLAVSLGQRATISCRASESVDNSGISFMNWFQQKPGQPPKLLIYAASNPGSGVPARFSGSGSGTDFSLNIHPMEEDDTAMYFCQQSKEVPWTFGGGTELEIKR

SEQ ID NO: 1826 - protein, 10 aa, synthetic construct
  REGION 1..10: note = synthetic
ESVDNSGISF

SEQ ID NO: 1827 - skipped

SEQ ID NO: 1828 - protein, 9 aa, synthetic construct
  REGION 1..9: note = synthetic
QQSKEVPWT

SEQ ID NO: 1829 - protein, 218 aa, synthetic construct
  REGION 1..218: note = synthetic
DIVLTQSPTSLAVSLGQRATISCRASESVDNSGISFMNWFQQKPGQPPKLLIYAASNPGSGVPARFSGSGSGTDFSLNIHPMEEDDTAMYFCQQSKEVPWTFGGGTELEIKRTVAAPSVFIFPPSDEQLKSGTASVVCLLNNFYPREAKVQWKVDNALQSGNSQESVTEQDSKDSTYSLSSTLTLSKADYEKHKVYACEVTHQGLSSPVTKSFNRGEC

SEQ ID NO: 1830 - protein, 113 aa, synthetic construct [sequence omitted]

SEQ ID NO: 1831 - protein, 8 aa, synthetic construct
  REGION 1..8: note = synthetic
GITFSNSG

SEQ ID NO: 1832 - protein, 8 aa, synthetic construct
  REGION 1..8: note = synthetic
IWYDGSKR

SEQ ID NO: 1833 - protein, 6 aa, synthetic construct
  REGION 1..6: note = synthetic
ATNDDY

SEQ ID NO: 1834 - protein, 440 aa, synthetic construct
  REGION 1..440: note = synthetic
QVQLVESGGGVVQPGRSLRLDCKASGITFSNSGMHWVRQAPGKGLEWVAVIWYDGSKRYYADSVKGRFTISRDNSKNTLFLQMNSLRAEDTAVYYCATNDDYWGQGTLVTVSSASTKGPSVFPLAPCSRSTSESTAALGCLVKDYFPEPVTVSWNSGALTSGVHTFPAVLQSSGLYSLSSVVTVPSSSLGTKTYTCNVDHKPSNTKVDKRVESKYGPPCPPCPAPEFLGGPSVFLFPPKPKDTLMISRTPEVTCVVVDVSQEDPEVQFNWYVDGVEVHNAKTKPREEQFNSTYRVVSVLTVLHQDWLNGKEYKCKVSNKGLPSSIEKTISKAKGQPREPQVYTLPPSQEEMTKNQVSLTCLVKGFYPSDIAVEWESNGQPENNYKTTPPVLDSDGSFFLYSRLTVDKSRWQEGNVFSCSVMHEALHNHYTQKSLSLSLGK

SEQ ID NO: 1835 - protein, 108 aa, synthetic construct
  REGION 1..108: note = synthetic
EIVLTQSPATLSLSPGERATLSCRASQSVSSYLAWYQQKPGQAPRLLIYDASNRATGIPARFSGSGSGTDFTLTISSLEPEDFAVYYCQQSSNWPRTFGQGTKVEIKR

SEQ ID NO: 1836 - protein, 6 aa, synthetic construct
  REGION 1..6: note = synthetic
QSVSSY

SEQ ID NO: 1837 - skipped

SEQ ID NO: 1838 - protein, 9 aa, synthetic construct
  REGION 1..9: note = synthetic
QQSSNWPRT

SEQ ID NO: 1839 - protein, 214 aa, synthetic construct
  REGION 1..214: note = synthetic
EIVLTQSPATLSLSPGERATLSCRASQSVSSYLAWYQQKPGQAPRLLIYDASNRATGIPARFSGSGSGTDFTLTISSLEPEDFAVYYCQQSSNWPRTFGQGTKVEIKRTVAAPSVFIFPPSDEQLKSGTASVVCLLNNFYPREAKVQWKVDNALQSGNSQESVTEQDSKDSTYSLSSTLTLSKADYEKHKVYACEVTHQGLSSPVTKSFNRGEC

SEQ ID NO: 1840 - protein, 121 aa, synthetic construct
  REGION 1..121: note = synthetic
EVQLVESGGGLVQPGGSLRLSCAASGFTFSRYWMSWVRQAPGKGLEWVANIKQDGSEKYYVDSVKGRFTISRDNAKNSLYLQMNSLRAEDTAVYYCAREGGWFGELAFDYWGQGTLVTVSS

SEQ ID NO: 1841 - protein, 5 aa, synthetic construct
  REGION 1..5: note = synthetic
RYWMS

SEQ ID NO: 1842 - protein, 17 aa, synthetic construct
  REGION 1..17: note = synthetic
NIKQDGSEKYYVDSVKG

SEQ ID NO: 1843 - protein, 11 aa, synthetic construct
  REGION 1..11: note = synthetic
EGGWFGELAFD

SEQ ID NO: 1844 - protein, 108 aa, synthetic construct
  REGION 1..108: note = synthetic
EIVLTQSPGTLSLSPGERATLSCRASQRVSSSYLAWYQQKPGQAPRLLIYDASSRATGIPDRFSGSGSGTDFTLTISRLEPEDFAVYYCQQYGSLPWTFGQGTKVEIK

SEQ ID NO: 1845 - protein, 12 aa, synthetic construct
  REGION 1..12: note = synthetic
RASQRVSSSYLA

SEQ ID NO: 1846 - protein, 7 aa, synthetic construct
  REGION 1..7: note = synthetic
DASSRAT

SEQ ID NO: 1847 - protein, 9 aa, synthetic construct
  REGION 1..9: note = synthetic
QQYGSLPWT

SEQ ID NO: 1848 - protein, 447 aa, synthetic construct
  REGION 1..447: note = synthetic
EVQLVESGGGLVQPGGSLRLSCAASGFTFSDSWIHWVRQAPGKGLEWVAWISPYGGSTYYADSVKGRFTISADTSKNTAYLQMNSLRAEDTAVYYCARRHWPGGFDYWGQGTLVTVSAASTKGPSVFPLAPSSKSTSGGTAALGCLVKDYFPEPVTVSWNSGALTSGVHTFPAVLQSSGLYSLSSVVTVPSSSLGTQTYICNVNHKPSNTKVDKKVEPKSCDKTHTCPPCPAPELLGGPSVFLFPPKPKDTLMISRTPEVTCVVVDVSHEDPEVKFNWYVDGVEVHNAKTKPREEQYASTYRVVSVLTVLHQDWLNGKEYKCKVSNKALPAPIEKTISKAKGQPREPQVYTLPPSRDELTKNQVSLTCLVKGFYPSDIAVEWESNGQPENNYKTTPPVLDSDGSFFLYSKLTVDKSRWQQGNVFSCSVMHEALHNHYTQKSLSLSPG

SEQ ID NO: 1849 - protein, 214 aa, synthetic construct
  REGION 1..214: note = synthetic
DIQMTQSPSSLSASVGDRVTITCRASQDVSTAVAWYQQKPGKAPKLLIYSASFLYSGVPSRFSGSGSGTDFTLTISSLQPEDFATYYCQQYLFTPPTFGQGTKVEIKRTVAAPSVFIFPPSDEQLKSGTASVVCLLNNFYPREAKVQWKVDNALQSGNSQESVTEQDSKDSTYSLSSTLTLSKADYEKHKVYACEVTHQGLSSPVTKSFNRGEC

SEQ ID NO: 1850 - protein, 118 aa, synthetic construct
  REGION 1..118: note = synthetic
EVQLVESGGGLVQPGGSLRLSCAASGFTFSDSWIHWVRQAPGKGLEWVAWISPYGGSTYYADSVKGRFTISADTSKNTAYLQMNSLRAEDTAVYYCARRHWPGGFDYWGQGTLVTVSA

SEQ ID NO: 1851 - protein, 10 aa, synthetic construct
  REGION 1..10: note = synthetic
GFTFSDSWIH

SEQ ID NO: 1852 - protein, 18 aa, synthetic construct
  REGION 1..18: note = synthetic
AWISPYGGSTYYADSVKG

SEQ ID NO: 1853 - protein, 9 aa, synthetic construct
  REGION 1..9: note = synthetic
RHWPGGFDY

SEQ ID NO: 1854 - protein, 108 aa, synthetic construct
  REGION 1..108: note = synthetic
DIQMTQSPSSLSASVGDRVTITCRASQDVSTAVAWYQQKPGKAPKLLIYSASFLYSGVPSRFSGSGSGTDFTLTISSLQPEDFATYYCQQYLYHPATFGQGTKVEIKR

SEQ ID NO: 1855 - protein, 11 aa, synthetic construct
  REGION 1..11: note = synthetic
RASQDVSTAVA

SEQ ID NO: 1856 - protein, 7 aa, synthetic construct
  REGION 1..7: note = synthetic
SASFLYS

SEQ ID NO: 1857 - protein, 9 aa, synthetic construct
  REGION 1..9: note = synthetic
QQYLYHPAT

SEQ ID NO: 1858 - protein, 122 aa, synthetic construct
  REGION 1..122: note = synthetic
EVQLVESGGGLVQPGGSLRLSCAASGFTFSDSWIHWVRQAPGKGLEWVAWISPYGGSTYYADSVKGRFTISADTSKNTAYLQMNSLRAEDTAVYYCARRHWPGGFDYWGQGTLVTVSSASTK

SEQ ID NO: 1859 - protein, 108 aa, synthetic construct; identical to SEQ ID NO: 1854
  REGION 1..108: note = synthetic

SEQ ID NO: 1860 - protein, 118 aa, synthetic construct [sequence omitted]

SEQ ID NO: 1861 - protein, 108 aa, synthetic construct; identical to SEQ ID NO: 1854
  REGION 1..108: note = synthetic

SEQ ID NO: 1862 - protein, 118 aa, synthetic construct
  REGION 1..118: note = synthetic
EVQLVESCGGLVQPGGSLRLSCAASGFTFSDSWIHWVRQAPGKGLEWVAWISPYGGSTYYADSVKGRFTISRDTSKNTAYLQMNSLRAEDTAVYYCARRHWPGGFDYWGQGTLVTVSA

SEQ ID NO: 1863 - protein, 118 aa, synthetic construct
  REGION 1..118: note = synthetic
EVQLVESGGGLVQPGGSLRLSCAASGFTFSDSWIHWVRQAPGKGLEWVAWISPYGGSTYYADSVKGRFTISRDTSKNTAYLQMNSLRAEDTAVYYCARRHWPGGFDYWGQGTLVTVSA

SEQ ID NO: 1864 - protein, 118 aa, synthetic construct
  REGION 1..118: note = synthetic
EVQLVESGGGLVQPGGSLRLSCAASGFTFSGSWIHWVRQAPGKGLEWVAWILPYGGSSYYADSVKGRFTISRDTSKNTAYLQMNSLRAEDTAVYYCARRHWPGGFDYWGQGTLVTVSA

SEQ ID NO: 1865 - protein, 108 aa, synthetic construct; identical to SEQ ID NO: 1854
  REGION 1..108: note = synthetic

SEQ ID NO: 1866 - protein, 108 aa, synthetic construct
  REGION 1..108: note = synthetic
DIQMTQSPSSLSASVGDRVTITCRASQDVSTAVAWYQQKPGKAPKLLIYSASFLYSGVPSRFSGSGSGTDFTLTISSLQPEDFATYYCQQYYNVPWTFGQGTKVEIKR

SEQ ID NO: 1867 - protein, 108 aa, synthetic construct
  REGION 1..108: note = synthetic
DIQMTQSPSSLSASVGDRVTITCRASQDVSTAVAWYQQKPGKAPKLLIYSASFLYSGVPSRFSGSGSGTDFTLTISSLQPEDFATYYCQQYYAPPWTFGQGTKVEIKR

SEQ ID NO: 1868 - protein, 108 aa, synthetic construct
  REGION 1..108: note = synthetic
DIQMTQSPSSLSASVGDRVTITCRASQDVSTAVAWYQQKPGKAPKLLIYSASFLYSGVPSRFSGSGSGTDFTLTISSLQPEDFATYYCQQYYTVPWTFGQGTKVEIKR

SEQ ID NO: 1869 - protein, 108 aa, synthetic construct
  REGION 1..108: note = synthetic
DIQMTQSPSSLSASVGDRVTITCRASQVINTFLAWYQQKPGKAPKLLIYSASTLASGVPSRFSGSGSGTDFTLTISSLQPEDFATYYCQQYYTVPRTFGQGTKVEIKR

SEQ ID NO: 1870 - protein, 108 aa, synthetic construct
  REGION 1..108: note = synthetic
DIQMTQSPSSLSASVGDRVTITCRASQDVSTAVAWYQQKPGKAPKLLIYSASFLYSGVPSRFSGSGSGTDFTLTISSLQPEDFATYYCQQGYGVPRTFGQGTKVEIKR

SEQ ID NO: 1871 - protein, 108 aa, synthetic construct
  REGION 1..108: note = synthetic
DIQMTQSPSSLSASVGDRVTITCRASQDVSTAVAWYQQKPGKAPKLLIYSASFLYSGVPSRFSGSGSGTDFTLTISSLQPEDFATYYCQQYLFTPPTFGQGTKVEIKR

SEQ ID NO: 1872 - protein, 108 aa, synthetic construct
  REGION 1..108: note = synthetic
DIQMTQSPSSLSASVGDRVTITCRASQDVSTAVAWYQQKPGKAPKLLIYSASFLYSGVPSRFSGSGSGTDFTLTISSLQPEDFATYYCQQYFITPTTFGQGTKVEIKR

SEQ ID NO: 1873 - protein, 107 aa, synthetic construct
  REGION 1..107: note = synthetic
DIQMTQSPSSLSASVGDRVTITCRASQDVSTAVAWYQQKPGKAPKLLIYSASFLYSGVPSRFSGSGSGTDFTLTISSLQPEDFATYYCQQYYTPPTFGQGTKVEIKR

SEQ ID NO: 1874 - protein, 108 aa, synthetic construct
  REGION 1..108: note = synthetic
DIQMTQSPSSLSASVGDRVTITCRASQDVSTAVAWYQQKPGKAPKLLIYSASFLYSGVPSRFSGSGSGTDFTLTISSLQPEDFATYYCQQFFYTPPTFGQGTKVEIKR

SEQ ID NO: 1875 - protein, 108 aa, synthetic construct
  REGION 1..108: note = synthetic
DIQMTQSPSSLSASVGDRVTITCRASQDVSTAVAWYQQKPGKAPKLLIYSASFLYSGVPSRFSGSGSGTDFTLTISSLQPEDFATYYCQQSLFTPPTFGQGTKVEIKR

SEQ ID NO: 1876 - protein, 108 aa, synthetic construct
  REGION 1..108: note = synthetic
DIQMTQSPSSLSASVGDRVTITCRASQDVSTAVAWYQQKPGKAPKLLIYSASFLYSGVPSRFSGSGSGTDFTLTISSLQPEDFATYYCQQSLYTPPTFGQGTKVEIKR

SEQ ID NO: 1877 - protein, 108 aa, synthetic construct
  REGION 1..108: note = synthetic
DIQMTQSPSSLSASVGDRVTITCRASQDVSTAVAWYQQKPGKAPKLLIYSASFLYSGVPSRFSGSGSGTDFTLTISSLQPEDFATYYCQQSWYHPPTFGQGTKVEIKR

SEQ ID NO: 1878 - protein, 108 aa, synthetic construct
  REGION 1..108: note = synthetic
DIQMTQSPSSLSASVGDRVTITCRASQDVSTAVAWYQQKPGKAPKLLIYSASFLYSGVPSRFSGSGSGTDFTLTISSLQPEDFATYYCQQYFYIPPTFGQGTKVEIKR

SEQ ID NO: 1879 - protein, 108 aa, synthetic construct
  REGION 1..108: note = synthetic
DIQMTQSPSSLSASVGDRVTITCRASQDVSTAVAWYQQKPGKAPKLLIYSASFLYSGVPSRFSGSGSGTDFTLTISSLQPEDFATYYCQQYWYTPYTFGQGTKVEIKR

SEQ ID NO: 1880 - protein, 108 aa, synthetic construct
  REGION 1..108: note = synthetic
DIQMTQSPSSLSASVGDRVTITCRASQDVSTAVAWYQQKPGKAPKLLIYSASFLYSGVPSRFSGSGSGTDFTLTISSLQPEDFATYYCQQSYFIPPTFGQGTKVEIKR

SEQ ID NO: 1881 - protein, 450 aa, synthetic construct
  REGION 1..450: note = synthetic
EVQLLESGGGLVQPGGSLRLSCAASGFTFSSYIMMWVRQAPGKGLEWVSSIYPSGGITFYADTVKGRFTISRDNSKNTLYLQMNSLRAEDTAVYYCARIKLGTVTTVDYWGQGTLVTVSSASTKGPSVFPLAPSSKSTSGGTAALGCLVKDYFPEPVTVSWNSGALTSGVHTFPAVLQSSGLYSLSSVVTVPSSSLGTQTYICNVNHKPSNTKVDKKVEPKSCDKTHTCPPCPAPELLGGPSVFLFPPKPKDTLMISRTPEVTCVVVDVSHEDPEVKFNWYVDGVEVHNAKTKPREEQYNSTYRVVSVLTVLHQDWLNGKEYKCKVSNKALPAPIEKTISKAKGQPREPQVYTLPPSRDELTKNQVSLTCLVKGFYPSDIAVEWESNGQPENNYKTTPPVLDSDGSFFLYSKLTVDKSRWQQGNVFSCSVMHEALHNHYTQKSLSLSPGK

SEQ ID NO: 1882 - protein, 216 aa, synthetic construct
  REGION 1..216: note = synthetic
QSALTQPASVSGSPGQSITISCTGTSSDVGGYNYVSWYQQHPGKAPKLMIYDVSNRPSGVSNRFSGSKSGNTASLTISGLQAEDEADYYCSSYTSSSTRVFGTGTKVTVLGQPKANPTVTLFPPSSEELQANKATLVCLISDFYPGAVTVAWKADGSPVKAGVETTKPSKQSNNKYAASSYLSLTPEQWKSHRSYSCQVTHEGSTVEKTVAPTECS

SEQ ID NO: 1883 - protein, 118 aa, synthetic construct; identical to SEQ ID NO: 1850
  REGION 1..118: note = synthetic

SEQ ID NO: 1884 - protein, 106 aa, synthetic construct
  REGION 1..106: note = synthetic
DIQMTQSPSSLSASVGDRVTITCRASQDVSTAVAWYQQKPGKAPKWYSASFLYSGVPSRFSGSGSGTDFTLTISSLQPEDFATYYCQQYLYHPATFGQGTKVEIKR

SEQ ID NO: 1885 - protein, 448 aa, synthetic construct
  REGION 1..448: note = synthetic
EVQLVESGGGLVQPGGSLRLSCAASGFTFSDSWIHWVRQAPGKGLEWVAWISPYGGSTYYADSVKGRFTISADTSKNTAYLQMNSLRAEDTAVYYCARRHWPGGFDYWGQGTLVTVSSASTKGPSVFPLAPSSKSTSGGTAALGCLVKDYFPEPVTVSWNSGALTSGVHTFPAVLQSSGLYSLSSVVTVPSSSLGTQTYICNVNHKPSNTKVDKKVEPKSCDKTHTCPPCPAPELLGGPSVFLFPPKPKDTLMISRTPEVTCVVVDVSHEDPEVKFNWYVDGVEVHNAKTKPREEQYASTYRVVSVLTVLHQDWLNGKEYKCKVSNKALPAPIEKTISKAKGQPREPQVYTLPPSREEMTKNQVSLTCLVKGFYPSDIAVEWESNGQPENNYKTTPPVLDSDGSFFLYSKLTVDKSRWQQGNVFSCSVMHEALHNHYTQKSLSLSPGK

SEQ ID NO: 1886 - protein, 214 aa, synthetic construct
  REGION 1..214: note = synthetic
DIQMTQSPSSLSASVGDRVTITCRASQDVSTAVAWYQQKPGKAPKLLIYSASFLYSGVPSRFSGSGSGTDFTLTISSLQPEDFATYYCQQYLYHPATFGQGTKVEIKRTVAAPSVFIFPPSDEQLKSGTASVVCLLNNFYPREAKVQWKVDNALQSGNSQESVTEQDSKDSTYSLSSTLTLSKADYEKHKVYACEVTHQGLSSPVTKSFNRGEC

SEQ ID NO: 1887 - protein, 9 aa, synthetic construct
  REGION 1..9: note = SYNTHETIC
  VARIANT 4: note = X is S, D or G
  VARIANT 6: note = X is Y, V or T
FTFXNXAMS

SEQ ID NO: 1888 - protein, 17 aa, synthetic construct
  REGION 1..17: note = synthetic
  VARIANT 4: note = X is G or A
  VARIANT 5: note = X is N or S
  VARIANT 6: note = X is A or G
AISXXXGSTYYADSVKG

SEQ ID NO: 1889 - protein, 11 aa, synthetic construct
  REGION 1..11: note = synthetic
AKGPDRQVFDY

SEQ ID NO: 1890 - protein, 11 aa, synthetic construct
  REGION 1..11: note = synthetic
  VARIANT 7: note = X is S or D
RASQGIXSWLA

SEQ ID NO: 1891 - protein, 7 aa, synthetic construct
  REGION 1..7: note = synthetic
AASSLQS

SEQ ID NO: 1892 - protein, 9 aa, synthetic construct
  REGION 1..9: note = synthetic
  VARIANT 4: note = X is Y or L
  VARIANT 5: note = X is S or F
QHAXXFPYT

SEQ ID NO: 1893 - protein, 9 aa, synthetic construct
  REGION 1..9: note = synthetic
  VARIANT 4: note = X is N, R, D, G or K
  VARIANT 5: note = X is S, H, I or Q
  VARIANT 8: note = X is M or V
YTFXXYAXH

SEQ ID NO: 1894 - protein, 17 aa, synthetic construct
  REGION 1..17: note = synthetic
  VARIANT 8: note = X is A, V or N
  VARIANT 10: note = X is K or L
WIHAGTGXTXYSQKFQG

SEQ ID NO: 1895 - protein, 17 aa, synthetic construct
  REGION 1..17: note = synthetic
  VARIANT 6: note = X is E or S
ARGLGXVGPTGTSWFDP

SEQ ID NO: 1896 - protein, 11 aa, synthetic construct
  REGION 1..11: note = synthetic
RASQSISSWLA

SEQ ID NO: 1897 - protein, 7 aa, synthetic construct
  REGION 1..7: note = synthetic
EASSLES

SEQ ID NO: 1898 - protein, 9 aa, synthetic construct
  REGION 1..9: note = synthetic
  VARIANT 5: note = X is V, Q, Y, L or S
  VARIANT 6: note = X is F, S or G
QQYRXXPFT

SEQ ID NO: 1899 - protein, 9 aa, synthetic construct
  REGION 1..9: note = synthetic
  VARIANT 4: note = X is N or S
  VARIANT 5: note = X is S or E
  VARIANT 7: note = X is V or P
GTFXXYXIS

SEQ ID NO: 1900 - protein, 17 aa, synthetic construct
  REGION 1..17: note = synthetic
  VARIANT 5: note = X is G or Y
  VARIANT 6: note = X is A or S
  VARIANT 10: note = X is N, I or V
GIIPXXGTAXYAQKFQG

SEQ ID NO: 1901 - protein, 9 aa, synthetic construct
  REGION 1..9: note = synthetic
  VARIANT 6: note = X is S, F or G
ARGRHXHET

SEQ ID NO: 1902 - protein, 11 aa, synthetic construct
  REGION 1..11: note = synthetic
RASQGISSWLA

SEQ ID NO: 1903 - protein, 7 aa, synthetic construct
  REGION 1..7: note = synthetic
AASSLQS

SEQ ID NO: 1904 - protein, 9 aa, synthetic construct
  REGION 1..9: note = synthetic
  VARIANT 5: note = X is S or R
  VARIANT 6: note = X is L, F or I
QQVYXXPWT

SEQ ID NO: 1905 - protein, 11 aa, synthetic construct
  REGION 1..11: note = synthetic
  VARIANT 6: note = X is S or P
  VARIANT 7: note = X is D or E
  VARIANT 9: note = X is Y, G or P
GSISSXXYXWG

SEQ ID NO: 1906 - protein, 16 aa, synthetic construct
  REGION 1..16: note = syntheticv
  VARIANT 3: note = X is V or Y
  VARIANT 4: note = X is N or Y
  VARIANT 5: note = X is S or Q
  VARIANT 7: note = X is S or A
SIXXXGXTYYNPSLKS

SEQ ID NO: 1907 - protein, 11 aa, synthetic construct
  REGION 1..11: note = synthetic
  VARIANT 5: note = X is H or Y
  VARIANT 8: note = X is V or L
ARGPXRQXFDY

SEQ ID NO: 1908 - protein, 11 aa, synthetic construct
  REGION 1..11: note = synthetic
RASQGISSWLA

SEQ ID NO: 1909 - protein, 7 aa, synthetic construct
  REGION 1..7: note = synthetic
AASSLQS

SEQ ID NO: 1910 - protein, 9 aa, synthetic construct
  REGION 1..9: note = synthetic
  VARIANT 4: note = X is S or F
  VARIANT 5: note = X is S or V
QQGXXFPYT

SEQ ID NO: 1911 - protein, 11 aa, synthetic construct
  REGION 1..11: note = synthetic
  VARIANT 4: note = X is S or F
  VARIANT 6: note = X is S or P
  VARIANT 7: note = X is E or D
  VARIANT 9: note = X is G, P or Y
  VARIANT 11: note = X is G or S
GSIXSXXYXWX

SEQ ID NO: 1912 - protein, 16 aa, synthetic construct
  REGION 1..16: note = synthetic
  VARIANT 1: note = X is S or V
  VARIANT 3: note = X is V, Y, F or A
  VARIANT 4: note = X is N or Y
  VARIANT 5: note = X is S or Q
  VARIANT 7: note = X is S, A or N
XIXXXGXTYYNPSLKS

SEQ ID NO: 1913 - protein, 11 aa, synthetic construct
  REGION 1..11: note = synthetic
  VARIANT 5: note = X is H, Y or F
  VARIANT 8: note = X is V or L
ARGPXRQXFDY

SEQ ID NO: 1914 - protein, 11 aa, synthetic construct
  REGION 1..11: note = synthetic
RASQGISSWLA

SEQ ID NO: 1915 - protein, 7 aa, synthetic construct
  REGION 1..7: note = synthetic
AASSLQS

SEQ ID NO: 1916 - protein, 9 aa, synthetic construct
  REGION 1..9: note = synthetic
  VARIANT 4: note = X is S, F, N or W
  VARIANT 5: note = X is S or V
QQGXXFPYT

SEQ ID NO: 1917 - protein, 9 aa, Homo sapiens
SRFPNFSIL

SEQ ID NO: 1918 - protein, 8 aa, Homo sapiens
DPEQVVQR

SEQ ID NO: 1919 - protein, 10 aa, Homo sapiens
VDPEQVVQRH

SEQ ID NO: 1920 - protein, 163 aa, synthetic construct
HFGRLHCTTAVIRNINDQVLFVDKRQPVFEDMTDIDQSASEPQTRLIIYAYGDSRARGKAVTLSVKDSKMSTLSCKNKIISFEEMDPPENIDDIQSDLIFFQKRVPGHNKMEFESSLYEGHFLACQKEDDAFKLILKKKDENGDKSVMFTLTNLHQSHHHHHH

SEQ ID NO: 1921 - protein, 115 aa, Homo sapiens
MTMRHNWTPDLSPLWVLLLCAHVVTLLVRATPVSQTTTAATASVRSTKDPCPSQPPVFPAAKQCPALEVTWPEVEVPLSWAEGNLAPHPRSPALQPQQSTAAGLRLSTGPAAAQP

SEQ ID NO: 1922 - protein, 199 aa, Homo sapiens
MTMRHNWTPDLSPLWVLLLCAHVVTLLVRATPVSQTTTAATASVRSTKDPCPSQPPVFPAAKQCPALEVTWPEVEVPLNGTLSLSCVACSRFPNFSILYWLGNGSFIEHLPGRLWEGSTSRERGSTGTQLCKALVLEQLTPALHSTNFSCVLVDPEQVVQRHVVLAQLWVRSPRRGLQEQEELCFHMWGGKGGLCQSSL

SEQ ID NO: 1923 - protein, 163 aa, Homo sapiens
MTMRHNWTPDLSPLWVLLLCAHVVTLLVRATPVSQTTTAATASVRSTKDPCPSQPPVFPAAKQCPALEVTWPEVEVPLNGTLSLSCVACSRFPNFSILYWLGNGSFIEHLPGRLWEGSTSRERGSTGWAEGNLAPHPRSPALQPQQSTAAGLRLSTGPAAAQP

SEQ ID NO: 1924 - protein, 11 aa, synthetic construct
GSITSSSYYWG

SEQ ID NO: 1925 - protein, 16 aa, synthetic construct
SIYYSGATFYNPSLKS

SEQ ID NO: 1926 - protein, 15 aa, synthetic construct
ARDANYYGSAWAFDP

SEQ ID NO: 1927 - protein, 123 aa, synthetic construct
QLQLQESGPGLVKPSETLSLTCTVSGGSITSSSYYWGWIRQPPGKGLEWIGSIYYSGATFYNPSLKSRVTISVDTSKNQFSLKLSSVTAADTAVYYCARDANYYGSAWAFDPWGQGTLVTVSS

SEQ ID NO: 1928 - protein, 11 aa, synthetic construct
RASQSVSSYLA

SEQ ID NO: 1929 - protein, 7 aa, synthetic construct
DASNRAT

SEQ ID NO: 1930 - protein, 8 aa, synthetic construct
QQHFNLPT

SEQ ID NO: 1931 - protein, 106 aa, synthetic construct
EIVLTQSPATLSLSPGERATLSCRASQSVSSYLAWYQQKPGQAPRLLIYDASNRATGIPARFSGSGSGTDFTLTISSLEPEDFAVYYCQQHFNLPTFGGGTKVEIK

SEQ ID NO: 1932 - protein, 11 aa, synthetic construct
GSISSSKYYWG

SEQ ID NO: 1933 - protein, 16 aa, synthetic construct
SIYYSGSTFYNPSLKS

SEQ ID NO: 1934 - protein, 123 aa, synthetic construct
QLQLQESGPGLVKPSETLSLTCTVSGGSISSSKYYWGWIRQPPGKGLEWIGSIYYSGSTFYNPSLKSRVTISVDTSKNQFSLKLSSVTAADTAVYYCARDANYYGSAWAFDPWGQGTLVTVSS

SEQ ID NO: 1935 - protein, 11 aa, synthetic construct
GSISSTSHYWG

SEQ ID NO: 1936 - protein, 123 aa, synthetic construct
QLQLQESGPGLVKPSETLSLTCTVSGGSISSTSHYWGWIRQPPGKGLEWIGSIYYSGSTFYNPSLKSRVTISVDTSKNQFSLKLSSVTAADTAVYYCARDANYYGSAWAFDPWGQGTLVTVSS

SEQ ID NO: 1937 - protein, 123 aa, synthetic construct
QLQLQESGPGLVKPSETLSLTCTVSGGSISSTSHYWGWIRQPPGKGLEWIGSIYYSGSTFYNPSLKSRVTISVDTSKNQFSLKLSSVTAADTAVYYCARDANYYGGAWAFDPWGQGTLVTVSS

SEQ ID NO: 1938 - protein, 16 aa, synthetic construct
SIYYSGSTFYNPSLKG

SEQ ID NO: 1939 - protein, 122 aa, synthetic construct
QLQLQESGPGLVKPSETLSLTCTVSGGSISSTSHYWGWIRQPPGKGLEWIGSIYYSGSTFYNPSLKGRVTISVDTSKNQFSLKLSSVTAADTAVYYCARDANYYGSAWAFDPWGQGTLVTVS

SEQ ID NO: 1940 - protein, 11 aa, synthetic construct
GSIESGSYYWG

SEQ ID NO: 1941 - protein, 16 aa, synthetic construct
SIYYSGGTYYNPSLKS

SEQ ID NO: 1942 - protein, 15 aa, synthetic construct
ARDGVLTLNKRSFDI

SEQ ID NO: 1943 - protein, 12 aa, synthetic construct
RASQSVSSSYLA

SEQ ID NO: 1944 - protein, 7 aa, synthetic construct
GASSRAT

SEQ ID NO: 1945 - protein, 10 aa, synthetic construct
QQHTVRPPLT

SEQ ID NO: 1946 - protein, 123 aa, synthetic construct
QLQLQESGPGLVKPSETLSLTCTVSGGSIESGSYYWGWIRQPPGKGLEWIGSIYYSGGTYYNPSLKSRVTISVDTSKNQFSLKLSSVTAADTAVYYCARDGVLTLNKRSFDIWGQGTMVTVSS

SEQ ID NO: 1947 - protein, 109 aa, synthetic construct
EIVLTQSPGTLSLSPGERATLSCRASQSVSSSYLAWYQQKPGQAPRLLIYGASSRATGIPDRFSGSGSGTDFTLTISRLEPEDFAVYYCQQHTVRPPLTFGGGTKVEIK

SEQ ID NO: 1948 - protein, 11 aa, synthetic construct
GSIESGVYYWG

SEQ ID NO: 1949 - protein, 16 aa, synthetic construct
SIYYSGSTYYNPSLKS

SEQ ID NO: 1950 - protein, 123 aa, synthetic construct
QVQLQESGPGLVKPSQTLSLTCTVSGGSIESGVYYWGWIRQPPGKGLEWIGSIYYSGSTYYNPSLKSRVTISVDTSKNQFSLKLSSVTAADTAVYYCARDGVLTLNKRSFDIWGQGTMVTVSS

SEQ ID NO: 1951 - protein, 11 aa, synthetic construct
GSIASGSYYWG

SEQ ID NO: 1952 - protein, 16 aa, synthetic construct
SIYYSGQTYYNPSLKS

SEQ ID NO: 1953 - protein, 123 aa, synthetic construct
QLQLQESGPGLVKPSETLSLTCTVSGGSIASGSYYWGWIRQPPGKGLEWIGSIYYSGQTYYNPSLKSRVTISVDTSKNQFSLKLSSVTAADTAVYYCARDGVLTLNKRSFDIWGQGTMVTVSS

SEQ ID NO: 1954 - protein, 11 aa, synthetic construct
GSIESGLYYWG

SEQ ID NO: 1955 - protein, 123 aa, synthetic construct
QVQLQESGPGLVKPSQTLSLTCTVSGGSIESGLYYWGWIRQPPGKGLEWIGSIYYSGSTYYNPSLKSRVTISVDTSKNQFSLKLSSVTAADTAVYYCARDGVLTLNKRSFDIWGQGTMVTVSS

SEQ ID NO: 1956 - protein, 15 aa, synthetic construct
ARDGVLALNKRSFDI

SEQ ID NO: 1957 - protein, 123 aa, synthetic construct
QVQLQESGPGLVKPSQTLSLTCTVSGGSIESGLYYWGWIRQPPGKGLEWIGSIYYSGSTYYNPSLKSRATISVDTSKNQFSLKLSSVTAADTAVYYCARDGVLALNKRSFDIWGQGTMVTVSS

SEQ ID NO: 1958 - protein, 123 aa, synthetic construct
QVQLQESGPGLVKPSQTLSLTCTVSGGSIESGLYYWGWIRQPPGKGLEWIGSIYYSGSTYYNPSLKSRVTISVDTSKNQFSLKLSSVTAADTAVYYCARDGVLALNKRSFDIWGQGTMVTVSS

SEQ ID NO: 1959 - protein, 123 aa, synthetic construct
QVQLQESGPGLVKPSQTLSLTCTASGGSIESGLYYWGWIRQPPGKGLEWIGSIYYSGSTYYNPSLKSRVTISVDTSKNQFSLKLSSVTAADTAVYYCARDGVLALNKRSFDIWGQGTMVTVSS

SEQ ID NO: 1960 - protein, 11 aa, synthetic construct
RASQSVSSNLA

SEQ ID NO: 1961 - protein, 7 aa, synthetic construct
GASTRAT

SEQ ID NO: 1962 - protein, 10 aa, synthetic construct
QQYVVWPPLT

SEQ ID NO: 1963 - protein, 17 aa, synthetic construct
IINPSLGLTSYAQKFQG

SEQ ID NO: 1964 - protein, 14 aa, synthetic construct
ARGGRTTWIGAFDI

SEQ ID NO: 1965 - protein, 9 aa, synthetic construct
YTFGNYYMH

SEQ ID NO: 1966 - protein, 121 aa, synthetic construct
QVQLVQSGAEVKKPGASVKVSCKASGYTFGNYYMHWVRQAPGQGLEWMGIINPSLGLTSYAQKFQGRVTMTRDTSTSTVYMELSSLRSEDTAVYYCARGGRTTWIGAFDIWGQGTMVTVSS

SEQ ID NO: 1967 - protein, 108 aa, synthetic construct
EIVMTQSPATISVSPGERATLSCRASQSVSSNLAWYQQKPGQAPRLLIYGASTRATGIPARFSGSGSGTEFTLTISSLQSEDFAVYYCQQYVVWPPLTFGGGTKVEIK

SEQ ID NO: 1968 - protein, 9 aa, synthetic construct
YTFPAYYMH

SEQ ID NO: 1969 - protein, 121 aa, synthetic construct
QVQLVQSGAEVKKPGASVKVSCKASGYTFPAYYMHWVRQAPGQGLEWMGIINPSLGLTSYAQKFQGRVTMTRDTSTSTVYMELSSLRSEDTAVYYCARGGRTTWIGAFDIWGQGTMVTVSS

SEQ ID NO: 1970 - protein, 108 aa, synthetic construct
EIVMTQSPATLSVSPGERATLSCRASQSVSSNLAWYQQKPGQAPRLLIYGASTRATGIPARFSGSGSGTEFTLTISSLQSEDFAVYYCQQYVVWPPLTFGGGTKVEIK

SEQ ID NO: 1971 - protein, 9 aa, synthetic construct
YTFREYYMH

SEQ ID NO: 1972 - protein, 121 aa, synthetic construct
QVQLVQSGAEVKKPGASVKVSCKASGYTFREYYMHWVRQAPGQGLEWMGIINPSIGLTSYARKFQGRVTMTRDTSTSTVYMELSSLRSEDTAVYYCARGGRTTWIGAFDIWGQGTMVTVSS

SEQ ID NO: 1973 - protein, 9 aa, synthetic construct
QQYIVFPWT

SEQ ID NO: 1974 - protein, 17 aa, synthetic construct
IINPSIGLTSYARKFQG

SEQ ID NO: 1975 - protein, 14 aa, synthetic construct
ARGGRTTWIGALDI

SEQ ID NO: 1976 - protein, 121 aa, synthetic construct
QVQLVQSGAEVKKPGASVKVSCKASGYTFREYYMHWVRQAPGQGLEWMGIINPSIGLTSYARKFQGRVTMTRDTSTSTVYMELSSLRSEDTAVYYCARGGRTTWIGALDIWGQGTMVTVSS

SEQ ID NO: 1977 - protein, 107 aa, synthetic construct
EIVMTQSPATLSVSPGERATLSCRASQSVSSNLAWYQQKPGQAPRHLIYGASTRATGIPARFSGSGSGTEFTLTISSLQSEDFAVYYCQQYIVFPWTFGGGTKVEIK

SEQ ID NO: 1978 - protein, 9 aa, synthetic construct
YTFPAYYIH

SEQ ID NO: 1979 - protein, 17 aa, synthetic construct
IINPSLGLTSYARKFQG

SEQ ID NO: 1980 - protein, 121 aa, synthetic construct
QVQLVQSGAEVKKPGASVKVSCKASGYTFPAYYIHWVRQAPGQGLEWMGIINPSLGLTSYARKFQGRVTMTRDTSTSTVYMELSSLRSEDTAVYYCARGGRTTWIGALDIWGQGTMVTVSS

SEQ ID NO: 1981 - protein, 121 aa, synthetic construct
QVQLVQSGAEVKKPGASVKVSCKASGYTFPAYYMHWVRQAPGQGLEWMGIINPSLGLTSYARKFQGRVTMTRDTSTSTVYMELSSLRSEDTAVYYCARGGRTTWIGAFDIWGQGTMVTVSS

SEQ ID NO: 1982 - protein, 9 aa, synthetic construct
YTFTSHYMG

SEQ ID NO: 1983 - protein, 17 aa, synthetic construct
VINPSMGATSYAQKFQG

SEQ ID NO: 1984 - protein, 16 aa, synthetic construct
ARLHVSGSYYPAYLDY

SEQ ID NO: 1985 - protein, 123 aa, synthetic construct
QVQLVQSGAEVKKPGASVKVSCKASGYTFTSHYMGWVRQAPGQGLEWMGVINPSMGATSYAQKFQGRVTMTRDTSTLSTVYMELSSLRSEDTAVYYCARLHVSGSYYPAYLDYWGQGTMVTVS

SEQ ID NO: 1986 - protein, 17 aa, synthetic construct
IINPSMGATSYAQKFQG

SEQ ID NO: 1987 - protein, 123 aa, synthetic construct
QVQLVQSGAEVKKPGASVKVSCKASGYTFTSHYMGWVRQAPGQGLEWVGIINPSMGATSYAQKFQGRVTMTRDTSTSTVYMELSSLASEDTAVYYCARLHVSGSYYPAYLDYWGQGTMVTVSS

SEQ ID NO: 1988 - protein, 17 aa, synthetic construct
IINPSMGATSYTQKFRG

SEQ ID NO: 1989 - protein, 123 aa, synthetic construct
QVQLVQSGAEVKKPGASVKVSCKASGYTFTSHYMGWVRQAPGQGLEWMGIINPSMGATSYTQKFRGRVTMTRDTSTSTVYMELSSLASEDTAVYYCARLHVSGSYYPAYLDYWGQGTMVTVSS

SEQ ID NO: 1990 - protein, 9 aa, synthetic construct
FTFSEYTMN

SEQ ID NO: 1991 - protein, 17 aa, synthetic construct
AIVGSGDSTYYADSVKG

SEQ ID NO: 1992 - protein, 16 aa, synthetic construct
AKDYSSGDWIDYGMDV

SEQ ID NO: 1993 - protein, 11 aa, synthetic construct
QASQDISNYLN

SEQ ID NO: 1994 - protein, 7 aa, synthetic construct
DASNLAT

SEQ ID NO: 1995 - protein, 9 aa, synthetic construct
QQFDLLPPT

SEQ ID NO: 1996 - protein, 26 aa, synthetic construct
EVQLVESGGGLVKPGGSLRLSCAASG

SEQ ID NO: 1997 - protein, 14 aa, synthetic construct
WVRQAPGKGLEWVS

SEQ ID NO: 1998 - protein, 30 aa, synthetic construct
RFTISRDNSKNTLYLQMNSLRAEDTAVYYC

SEQ ID NO: 1999 - protein, 11 aa, synthetic construct
WGQGTTVTVSS

SEQ ID NO: 2000 - DNA, 369 bp, synthetic construct
  source 1..369: mol_type = other DNA
gaggtgcagctggtggagtctgggggaggcctggtcaagcctggggggtccctgagactctcctgtgcagcctctggattcaccttcagtgaatataccatgaactgggtccgccaggctccagggaaggggctggagtgggtctcagctattgtaggtagtggtgacagcacatactacgcagactccgtgaagggccggttcaccatctccagagacaattccaagaacacgctgtatctgcaaatgaacagcctgagagccgaggacacggcggtgtactactgcgccaaggactacagctccggagactggatcgattatggaatggacgtatggggccagggaacaactgtcaccgtctcctca

SEQ ID NO: 2001 - protein, 123 aa, synthetic construct
EVQLVESGGGLVKPGGSLRLSCAASGFTFSEYTMNWVRQAPGKGLEWVSAIVGSGDSTYYADSVKGRFTISRDNSKNTLYLQMNSLRAEDTAVYYCAKDYSSGDWIDYGMDVWGQGTTVTVSS

SEQ ID NO: 2002 - protein, 23 aa, synthetic construct
DIQMTQSPSSLSASVGDRVTITC

SEQ ID NO: 2003 - protein, 15 aa, synthetic construct
WYQQKPGKAPKLLIY

SEQ ID NO: 2004 - protein, 32 aa, synthetic construct
GVPSRFSGSGSGTDFTFTISSLQPEDIATYYC

SEQ ID NO: 2005 - protein, 10 aa, synthetic construct
FGGGTKVEIK

SEQ ID NO: 2006 - DNA, 321 bp, synthetic construct
  source 1..321: mol_type = other DNA
gacatccagatgacccagtctccatcctccctgtctgcatctgtaggagacagagtcaccatcacttgccaggcgagtcaggacattagcaactatttaaattggtatcagcagaaaccagggaaagcccctaagctcctgatctacgatgcatccaatttggcaacaggggtcccatcaaggttcagtggaagtggatctgggacagattttactttcaccatcagcagcctgcagcctgaagatattgcaacatattactgtcagcagttcgatctcctccctcctacttttggcggagggaccaaggttgagatcaaa

SEQ ID NO: 2007 - protein, 107 aa, synthetic construct
DIQMTQSPSSLSASVGDRVTITCQASQDISNYLNWYQQKPGKAPKLLIYDASNLATGVPSRFSGSGSGTDFTFTISSLQPEDIATYYCQQFDLLPPTFGGGTKVEIK

SEQ ID NO: 2008 - protein, 9 aa, synthetic construct
FTFSDYAMI

SEQ ID NO: 2009 - protein, 17 aa, synthetic construct
AISGGGESTYYADSVKG

SEQ ID NO: 2010 - protein, 16 aa, synthetic construct
AKDYSSGDWIDYGMDV

SEQ ID NO: 2011 - protein, 11 aa, synthetic construct
QASQDISNYLN

SEQ ID NO: 2012 - protein, 7 aa, synthetic construct
DASNLAT

SEQ ID NO: 2013 - protein, 9 aa, synthetic construct
QQFDLLPPT

SEQ ID NO: 2014 - protein, 26 aa, synthetic construct
EVQLLESGGGLVQPGGSLRLSCAASG

SEQ ID NO: 2015 - protein, 14 aa, synthetic construct
WVRQAPGKGLEWVS

SEQ ID NO: 2016 - protein, 30 aa, synthetic construct; identical to SEQ ID NO: 1998

SEQ ID NO: 2017 - protein, 11 aa, synthetic construct
WGQGTTVTVSS

SEQ ID NO: 2018 - DNA, 369 bp, synthetic construct
  source 1..369: mol_type = other DNA
gaggtgcagctgttggagtctgggggaggcttggtacagcctggggggtccctgagactctcctgtgcagcctctggattcacctttagcgactatgccatgatatgggtccgccaggctccagggaaggggctggagtgggtctcagctattagtggtggaggtgaaagcacatactacgcagactccgtgaagggccggttcaccatctccagagacaattccaagaacacgctgtatctgcaaatgaacagcctgagagccgaggacacggcggtgtactactgcgccaaggactacagctccggagactggatcgattatggaatggacgtatggggccagggaacaactgtcaccgtctcctca

SEQ ID NO: 2019 - protein, 123 aa, synthetic construct
EVQLLESGGGLVQPGGSLRLSCAASGFTFSDYAMIWVRQAPGKGLEWVSAISGGGESTYYADSVKGRFTISRDNSKNTLYLQMNSLRAEDTAVYYCAKDYSSGDWIDYGMDVWGQGTTVTVSS

SEQ ID NO: 2020 - protein, 23 aa, synthetic construct
DIQMTQSPSSLSASVGDRVTITC

SEQ ID NO: 2021 - protein, 15 aa, synthetic construct
WYQQKPGKAPKLLIY

SEQ ID NO: 2022 - protein, 32 aa, synthetic construct; identical to SEQ ID NO: 2004

SEQ ID NO: 2023 - protein, 10 aa, synthetic construct
FGGGTKVEIK

SEQ ID NO: 2024 - DNA, 321 bp, synthetic construct; identical to SEQ ID NO: 2006
  source 1..321: mol_type = other DNA

SEQ ID NO: 2025 - protein, 107 aa, synthetic construct; identical to SEQ ID NO: 2007

SEQ ID NO: 2026 - protein, 9 aa, synthetic construct
GTFDNYYIS

SEQ ID NO: 2027 - protein, 17 aa, synthetic construct
GIFPIFGTANYAQKFQG

SEQ ID NO: 2028 - protein, 17 aa, synthetic construct
AREVGHYSGSGPYYMDV

SEQ ID NO: 2029 - protein, 11 aa, synthetic construct
RASQSINSWLA

SEQ ID NO: 2030 - protein, 7 aa, synthetic construct
DASSLES

SEQ ID NO: 2031 - protein, 8 aa, synthetic construct
QQVGPYLT

SEQ ID NO: 2032 - protein, 26 aa, synthetic construct
QVQLVQSGAEVKKPGSSVKVSCKASG

SEQ ID NO: 2033 - protein, 14 aa, synthetic construct
WVRQAPGQGLEWMG

SEQ ID NO: 2034 - protein, 30 aa, synthetic construct
RVTITADESTSTAYMELSSLRSEDTAVYYC

SEQ ID NO: 2035 - protein, 11 aa, synthetic construct
WGKGTTVTVSS

SEQ ID NO: 2036 - DNA, 369 bp, synthetic construct
  source 1..369: mol_type = other DNA
caggtgcagctggtgcagtctggggctgaggtgaagaagcctgggtcctcggtgaaggtctcctgcaaggcttctggaggcaccttcgacaactattacatcagctgggtgcgacaggcccctggacaagggcttgagtggatgggagggatcttccctatcttcggtaccgcaaactacgcacagaagttccagggcagagtcacgattaccgcggacgaatccacgagcacagcctacatggagctgagcagcctgagatctgaggacacggcggtgtactactgcgccagagaagtcggacactactccggcagcccatactacatggacgtatggggcaagggtacaactgtcaccgtctcctca

SEQ ID NO: 2037 - protein, 123 aa, synthetic construct
QVQLVQSGAEVKKPGSSVKVSCKASGGTFDNYYISWVRQAPGQGLEWMGGIFPIFGTANYAQKFQGRVTITADESTSTAYMELSSLRSEDTAVYYCAREVGHYSGSPYYMDVWGKGTTVTVSS

SEQ ID NO: 2038 - protein, 23 aa, synthetic construct
DIQMTQSPSTLSASVGDRVTITC

SEQ ID NO: 2039 - protein, 15 aa, synthetic construct
WYQQKPGKAPKLLIS

SEQ ID NO: 2040 - protein, 32 aa, synthetic construct
GVPSRFSGSGSGTEFTLTISSLQPDDFATYYC

SEQ ID NO: 2041 - protein, 10 aa, synthetic construct
FGGGTKVEIK

SEQ ID NO: 2042 - DNA, 318 bp, synthetic construct
  source 1..318: mol_type = other DNA
gacatccagatgacccagtctccttccaccctgtctgcatctgtaggagacagagtcaccatcacttgccgggccagtcagagtattaatagctggttggcctggtatcagcagaaaccagggaaagcccctaagctcctgatctccgatgcctccagtttggaaagtggggtcccatcaaggttcagcggcagtggatctgggacagaattcactctcaccatcagcagcctgcagcctgatgattttgcaacttattactgccagcaggtcggcccctacctcacttttggcggagggaccaaggttgagatcaaa

SEQ ID NO: 2043 - protein, 106 aa, synthetic construct
DIQMTQSPSTLSASVGDRVTITCRASQSINSWLAWYQQKPGKAPKLLISDASSLESGVPSRFSGSGSGTEFTLTISSLQPDDFATYYCQQVGPYLTFGGGTKVEIK

SEQ ID NO: 2044 - protein, 9 aa, synthetic construct
FTFGDYAMS

SEQ ID NO: 2045 - protein, 19 aa, synthetic construct
FIGSKFYGGETEYTASVKG

SEQ ID NO: 2046 - protein, 13 aa, synthetic construct
ARGPRRYTYGMDV

SEQ ID NO: 2047 - protein, 11 aa, synthetic construct
RASQSISSYLN

SEQ ID NO: 2048 - protein, 7 aa, synthetic construct
AASSLQS

SEQ ID NO: 2049 - protein, 8 aa, synthetic construct
QQSSTPLT

SEQ ID NO: 2050 - protein, 26 aa, synthetic construct
EVQLVESGGGLVQPGRSLRLSCTASG

SEQ ID NO: 2051 - protein, 14 aa, synthetic construct
WFRQAPGKGLEWVG

SEQ ID NO: 2052 - protein, 30 aa, synthetic construct
RFTISRDGSKSIAYLQMNSLKTEDTAVYYC

SEQ ID NO: 2053 - protein, 11 aa, synthetic construct
WGQGTTVTVSS

SEQ ID NO: 2054 - DNA, 366 bp, synthetic construct
  source 1..366: mol_type = other DNA
gaggtgcagctggtggagtctgggggaggcttggtacagccagggcggtccctgagactctcctgtacagcttctggattcacctttggtgattatgctatgagctggttccgccaggctccagggaaggggctggagtgggtaggtttcattggaagcaaattctatggtggggaaacagaatacaccgcgtctgtgaaaggcagattcaccatctcaagagatggttccaaaagcatcgcctatctgcaaatgaacagcctgaaaaccgaggacacggcggtgtactactgcgccagaggaccaagacgctacacatacggaatggacgtatggggccagggaacaactgtcaccgtctcctca

SEQ ID NO: 2055 - protein, 122 aa, synthetic construct
EVQLVESGGGLVQPGRSLRLSCTASGFTFGDYAMSWFRQAPGKGLEWVGFIGSKFYGGETEYTASVKGRFTISRDGSKSIAYLQMNSLKTEDTAVYYCARGPRRYTYGMDVWGQGTTVTVSS

SEQ ID NO: 2056 - protein, 24 aa, synthetic construct
DIQGMTQSPSSLSASVGDRVTITC

SEQ ID NO: 2057 - protein, 15 aa, synthetic construct
WYQQKPGKAPKLLIY

SEQ ID NO: 2058 - protein, 32 aa, synthetic construct
GVPSRFSGSGSGTDFTLTISSLQPEDFATYYC

SEQ ID NO: 2059 - protein, 10 aa, synthetic construct
FGGGTKVEIK

SEQ ID NO: 2060 - DNA, 318 bp, synthetic construct
  source 1..318: mol_type = other DNA
gacatccagatgacccagtctccatcctccctgtctgcatctgtaggagacagagtcaccatcacttgccgggcaagtcagagcattagcagctatttaaattggtatcagcagaaaccagggaaagcccctaagctcctgatctatgctgcatccagtttgcaaagtggggtcccatcaaggttcagtggcagtggatctgggacagatttcactctcaccatcagcagtctgcaacctgaagattttgcaacttactactgtcagcaaagctccacccccctcacttttggcggagggaccaaggttgagatcaaa

SEQ ID NO: 2061 - protein, 106 aa, synthetic construct
DIQMTQSPSSLSASVGDRVTITCRASQSISSYLNWYQQKPGKAPKLLIYAASSLQSGVPSRFSGSGSGTDFTLTISSLQPEDFATYYCQQSSTPLTFGGGTKVEIK

SEQ ID NO: 2062 - protein, 9 aa, synthetic construct
FTFDDYAVH

SEQ ID NO: 2063 - protein, 17 aa, synthetic construct
GISWSSGLIGYADSVKG

SEQ ID NO: 2064 - protein, 13 aa, synthetic construct
AKGPPTYQDYFDL

SEQ ID NO: 2065 - protein, 11 aa, synthetic construct
RASQSVSRYLA

SEQ ID NO: 2066 - protein, 7 aa, synthetic construct
DASNRAT

SEQ ID NO: 2067 - protein, 10 aa, synthetic construct
QQVSFFPPIT

SEQ ID NO: 2068 - protein, 26 aa, synthetic construct
EVQLVESGGGLVQPGRSLRLSCAASG

SEQ ID NO: 2069 - protein, 14 aa, synthetic construct
WVRQAPGKGLEWVS

SEQ ID NO: 2070 - protein, 30 aa, synthetic construct
RFTISRDNAKNSLYLQMNSLRAEDTAVYYC

SEQ ID NO: 2071 - protein, 11 aa, synthetic construct
WGRGTLVTVSS

SEQ ID NO: 2072 - DNA, 360 bp, synthetic construct
  source 1..360: mol_type = other DNA
gaagtgcagctggtggagtctgggggaggcttggtacagcctggcaggtccctgagactctcctgtgcagcctctggattcacctttgatgattatgccgtgcactgggtccggcaagctccagggaagggcctggagtgggtctcaggtattagttggagtagtggactaataggctatgcggactctgtgaagggccgattcaccatctccagagacaacgccaagaactccctgtatctgcaaatgaacagtctgagagctgaggacacggcggtgtactactgcgccaagggccctcctacctaccaagactacttcgacctatgggggagaggtaccttggtcaccgtctcctca

SEQ ID NO: 2073 - protein, 120 aa, synthetic construct
EVQLVESGGGLVQPGRSLRLSCAASGFTFDDYAVHWVRQAPGKGLEWVSGISWSSGLIGYADSVKGRFTISRDNAKNSLYLQMNSLRAEDTAVYYCAKGPPTYQDYFDLWGRGTLVTVSS

SEQ ID NO: 2074 - protein, 23 aa, synthetic construct
EIVLTQSPATLSLSPGERATLSC

SEQ ID NO: 2075 - protein, 15 aa, synthetic construct
WYQQKPGQAPRLLIY

SEQ ID NO: 2076 - protein, 32 aa, synthetic construct
GIPARFSGSGSGTDFTLTISSLEPEDFAVYYC

SEQ ID NO: 2077 - protein, 10 aa, synthetic construct
FGGGTKVEIK

SEQ ID NO: 2078 - DNA, 324 bp, synthetic construct
  source 1..324: mol_type = other DNA
gaaattgtgttgacacagtctccagccaccctgtctttgtctccaggggaaagagccaccctctcctgcagggccagtcagagtgttagcaggtacttagcctggtaccaacagaaacctggccaggctcccaggctcctcatctatgatgcatccaacagggccactggcatcccagccaggttcagtggcagtgggtctgggacagacttcactctcaccatcagcagcctagagcctgaagattttgcagtttattactgtcagcaggtcagtttcttccctcctatcacttttggcggagggaccaaggttgagatcaaa

SEQ ID NO: 2079 - protein, 108 aa, synthetic construct
EIVLTQSPATLSLSPGERATLSCRASQSVSRYLAWYQQKPGQAPRLLIYDASNRATGIPARFSGSGSGTDFTLTISSLEPEDFAVYYCQQVSFFPPITFGGGTKVEIK

SEQ ID NO: 2080 - protein, 9 aa, synthetic construct
FTFSGHLMS

SEQ ID NO: 2081 - protein, 17 aa, synthetic construct
AISGSAGETYYADSVKG

SEQ ID NO: 2082 - protein, 19 aa, synthetic construct
ARDAYYDDWSGWADWYFDL

SEQ ID NO: 2083 - protein, 11 aa, synthetic construct
RASQSVSRYLA

SEQ ID NO: 2084 - protein, 7 aa, synthetic construct
DASNRAT

SEQ ID NO: 2085 - protein, 9 aa, synthetic construct
QQVSLLPPT

SEQ ID NO: 2086 - protein, 26 aa, synthetic construct
EVQLLESGGGLVQPGGSLRLSCAASG

SEQ ID NO: 2087 - protein, 14 aa, synthetic construct
WVRQAPGKGLEWVS

SEQ ID NO: 2088 - protein, 30 aa, synthetic construct; identical to SEQ ID NO: 1998

SEQ ID NO: 2089 - protein, 11 aa, synthetic construct
WGRGTLVTVSS

SEQ ID NO: 2090 - DNA, 378 bp, synthetic construct
  source 1..378: mol_type = other DNA
gaggtgcagctgttggagtctgggggaggcttggtacagcctggggggtccctgagactctcctgtgcagcctctggattcacctttagcggacacctaatgagctgggtccgccaggctccagggaaggggctggagtgggtctcagctattagtggatccgcaggtgaaacatactacgcagactccgtgaagggccggttcaccatctccagagacaattccaagaacacgctgtatctgcaaatgaacagcctgagagccgaggacacggcggtgtactactgcgccagagatgcgtactacgacgactggagcggatgggccgattggtacttcgatttatgggggagaggtaccttggtcaccgtctcctca

SEQ ID NO: 2091 - protein, 126 aa, synthetic construct
EVQLLESGGGLVQPGGSLRLSCAASGFTFSGHLMSWVRQAPGKGLEWVSAISGSAGETYYADSVKGRFTISRDNSKNTLYLQMNSLRAEDTAVYYCARDAYYDDWSGWADWYFDLWGRGTLVTVSS

SEQ ID NO: 2092 - protein, 23 aa, synthetic construct
EIVLTQSPATLSLSPGERATLSC

SEQ ID NO: 2093 - protein, 15 aa, synthetic construct
WYQQKPGQAPRLLIY

SEQ ID NO: 2094 - protein, 32 aa, synthetic construct; identical to SEQ ID NO: 2076

SEQ ID NO: 2095 - protein, 10 aa, synthetic construct
FGGGTKVEIK

SEQ ID NO: 2096 - DNA, 321 bp, synthetic construct
  source 1..321: mol_type = other DNA
gaaattgtgttgacacagtctccagccaccctgtctttgtctccaggggaaagagccaccctctcctgcagggccagtcagagtgttagcaggtacttagcctggtaccaacagaaacctggccaggctcccaggctcctcatctatgatgcatccaacagggccactggcatcccagccaggttcagtggcagtgggtctgggacagacttcactctcaccatcagcagcctagagcctgaagattttgcagtttattactgtcagcaggtcagtctcctccctcctacttttggcggagggaccaaggttgagatcaaa

SEQ ID NO: 2097 - protein, 107 aa, synthetic construct
EIVLTQSPATLSLSPGERATLSCRASQSVSRYLAWYQQKPGQAPRLLIYDASNRATGIPARFSGSGSGTDFTLTISSLEPEDFAVYYCQQVSLLPPTFGGGTKVEIK

SEQ ID NO: 2098 - protein, 9 aa, synthetic construct
FTFGDVAMS

SEQ ID NO: 2099 - protein, 19 aa, synthetic construct
YIGSKAYGGETEYTASVKG

SEQ ID NO: 2100 - protein, 17 aa, synthetic construct
ARAGHSYGSIASNWFDP

SEQ ID NO: 2101 - protein, 11 aa, synthetic construct
RASQSISSYLN

SEQ ID NO: 2102 - protein, 7 aa, synthetic construct
GASSLQS

SEQ ID NO: 2103 - protein, 9 aa, synthetic construct
QQGFYTPWT

SEQ ID NO: 2104 - protein, 26 aa, synthetic construct
EVQLVESGGGLVQPGRSLRLSCTASG

SEQ ID NO: 2105 - protein, 14 aa, synthetic construct
WFRQAPGKGLEWVG

SEQ ID NO: 2106 - protein, 30 aa, synthetic construct; identical to SEQ ID NO: 2052

SEQ ID NO: 2107 - protein, 11 aa, synthetic construct
WGQGTLVTVSS

SEQ ID NO: 2108 - DNA, 378 bp, synthetic construct
  source 1..378: mol_type = other DNA
gaggtgcagctggtggagtctgggggaggcttggtacagccagggcggtccctgagactctcctgtacagcttctggattcacctttggtgatgtcgctatgtcctggttccgccaggctccagggaaggggctggagtgggtaggttacattggaagcaaagcttatggtggggaaacagaatacaccgcgtctgtgaaaggcagattcaccatctcaagagatggttccaaaagcatcgcctatctgcaaatgaacagcctgaaaaccgaggacacggcggtgtactactgcgccagagctggacacagctacggatccatcgccagcaactggttcgacccatggggacagggtacattggtcaccgtctcctca

SEQ ID NO: 2109 - protein, 126 aa, synthetic construct
EVQLVESGGGLVQPGRSLRLSCTASGFTFGDVAMSWFRQAPGKGLEWVGYIGSKAYGGETEYTASVKGRFTISRDGSKSIAYLQMNSLKTEDTAVYYCARAGHSYGSIASNWFDPWGQGTLVTVSS

SEQ ID NO: 2110 - protein, 23 aa, synthetic construct
DIQMTQSPSSLSASVGDRVTITC

SEQ ID NO: 2111 - protein, 15 aa, synthetic construct
WYQQKPGKAPKLLIY

SEQ ID NO: 2112 - protein, 32 aa, synthetic construct; identical to SEQ ID NO: 2058

SEQ ID NO: 2113 - protein, 10 aa, synthetic construct
FGGGTKVEIK

SEQ ID NO: 2114 - DNA, 321 bp, synthetic construct
  source 1..321: mol_type = other DNA
gacatccagatgacccagtctccatcctccctgtctgcatctgtaggagacagagtcaccatcacttgccgggcaagtcagagcattagcagctatttaaattggtatcagcagaaaccagggaaagcccctaagctcctgatctatggtgcatccagtttgcaaagtggggtcccatcaaggttcagtggcagtggatctgggacagatttcactctcaccatcagcagtctgcaacctgaagattttgcaacttactactgtcagcaaggattctacactccttggacttttggcggagggaccaaggttgagatcaaa

SEQ ID NO: 2115 - protein, 107 aa, synthetic construct
DIQMTQSPSSLSASVGDRVTITCRASQSISSYLNWYQQKPGKAPKLLIYGASSLQSGVPSRFSGSGSGTDFTLTISSLQPEDFATYYCQQGFYTPWTFGGGTKVEIK

SEQ ID NO: 2116 - protein, 9 aa, synthetic construct
GTFSSAAIS

SEQ ID NO: 2117 - protein, 17 aa, synthetic construct
NIIPIVGIANYAQKRQG

SEQ ID NO: 2118 - protein, 16 aa, synthetic construct
ARDTGRGYTRHFWFDP

SEQ ID NO: 2119 - protein, 11 aa, synthetic construct
RASQSISSYLN

SEQ ID NO: 2120 - protein, 7 aa, synthetic construct
AASSLQS

SEQ ID NO: 2121 - protein, 8 aa, synthetic construct
QQSDILYT

SEQ ID NO: 2122 - protein, 26 aa, synthetic construct
QVQLVQSGAEVKKPGSSVKVSCKASG

SEQ ID NO: 2123 - protein, 14 aa, synthetic construct
WVRQAPGQGLEWMG

SEQ ID NO: 2124 - protein, 30 aa, synthetic construct; identical to SEQ ID NO: 2034

SEQ ID NO: 2125 - protein, 11 aa, synthetic construct
WGQGTLVTVSS

SEQ ID NO: 2126 - DNA, 369 bp, synthetic construct
  source 1..369: mol_type = other DNA
caggtgcagctggtgcagtctggggctgaggtgaagaagcctgggtcctcggtgaaggtctcctgcaaggcttctggaggcaccttcagctccgccgctatcagctgggtgcgacaggcccctggacaagggcttgagtggatgggaaacatcatccctatcgtaggtatagcaaactacgcacagaagttccagggcagagtcacgattaccgcggacgaatccacgagcacagcctacatggagctgagcagcctgagatctgaggacacggcggtgtactactgcgccagagacacgggacggggatacaccagacacttctggtttgacccctggggacagggtacattggtcaccgtctcctca

SEQ ID NO: 2127 - protein, 123 aa, synthetic construct
QVQLVQSGAEVKKPGSSVKVSCKASGGTFSSAAISWVRQAPGQGLEWMGNIIPIVGIANYAQKFQGRVTITADESTSTAYMELSSLRSEDTAVYYCARDTGRGYTRHFWFDPWGQGTLVTVSS

SEQ ID NO: 2128 - protein, 23 aa, synthetic construct
DIQMTQSPSSLSASVGDRVTITC

SEQ ID NO: 2129 - protein, 15 aa, synthetic construct
WYQQKPGKAPKLLIY

SEQ ID NO: 2130 - protein, 32 aa, synthetic construct; identical to SEQ ID NO: 2058

SEQ ID NO: 2131 - protein, 10 aa, synthetic construct
FGGGTKVEIK

SEQ ID NO: 2132 - DNA, 318 bp, synthetic construct
  source 1..318: mol_type = other DNA
gacatccagatgacccagtctccatcctccctgtctgcatctgtaggagacagagtcaccatcacttgccgggcaagtcagagcattagcagctatttaaattggtatcagcagaaaccagggaaagcccctaagctcctgatctatgctgcatccagtttgcaaagtggggtcccatcaaggttcagtggcagtggatctgggacagatttcactctcaccatcagcagtctgcaacctgaagattttgcaacttactactgtcagcaaagcgacatcctctacacttttggcggagggaccaaggttgagatcaaa

SEQ ID NO: 2133 - protein, 106 aa, synthetic construct
DIQMTQSPSSLSASVGDRVTITCRASQSISSYLNWYQQKPGKAPKLLIYAASSLQSGVPSRFSGSGSGTDFTLTISSLQPEDFATYYCQQSDILYTFGGGTKVEIK

SEQ ID NO: 2134 - protein, 9 aa, synthetic construct
GTFSNYAIS

SEQ ID NO: 2135 - protein, 17 aa, synthetic construct
GIIPIFGTANYAQKFQG

SEQ ID NO: 2136 - protein, 18 aa, synthetic construct
ARGRGALALVGPYYGMDV

SEQ ID NO: 2137 - protein, 16 aa, synthetic construct
RSSQSLLHSNGYNYLD

SEQ ID NO: 2138 - protein, 7 aa, synthetic construct
LGSHRAS

SEQ ID NO: 2139 - protein, 8 aa, synthetic construct
MQALRAPT

SEQ ID NO: 2140 - protein, 26 aa, synthetic construct
EVQLVQSGAEVKKPGSSVKVSCKASG

SEQ ID NO: 2141 - protein, 14 aa, synthetic construct
WVRQAPGQGLEWMG

SEQ ID NO: 2142 - protein, 30 aa, synthetic construct; identical to SEQ ID NO: 2034

SEQ ID NO: 2143 - protein, 11 aa, synthetic construct
WGQGTTVTVSS

SEQ ID NO: 2144 - DNA, 375 bp, synthetic construct
  source 1..375: mol_type = other DNA
gaggtgcagctggtgcagtctggggctgaggtgaagaagcctgggtcctcggtgaaggtctcctgcaaggcttctggaggcaccttcagcaactatgctatcagctgggtgcgacaggcccctggacaagggcttgagtggatgggagggatcatccctatctttggtacagcaaactacgcacagaagttccagggcagagtcacgattaccgcggacgaatccacgagcacagcctacatggagctgagcagcctgagatctgaggacacggcggtgtactactgcgccagaggcagaggcgctctggcactcgtcggaccatactacggaatggacgtatggggccagggaacaactgtcaccgtctcctca

SEQ ID NO: 2145 - protein, 125 aa, synthetic construct
EVQLVQSGAEVKKPGSSVKVSCKASGGTFSNYAISWVRQAPGQGLEWMGGIIPIFGTANYAQKFQGRVTITADESTSTAYMELSSLRSEDTAVYYCARGRGALALVGPYYGMDVWGQGTTVTVSS

SEQ ID NO: 2146 - protein, 23 aa, synthetic construct
DIVMTQSPLSLPVTPGEPASISC

SEQ ID NO: 2147 - protein, 15 aa, synthetic construct
WYLQKPGQSPQLLIY

SEQ ID NO: 2148 - protein, 32 aa, synthetic construct
GVPDRFSGSGSGTDFTLKISRVEAEDVGVYYC

SEQ ID NO: 2149 - protein, 10 aa, synthetic construct
FGGGTKVEIK

SEQ ID NO: 2150 - DNA, 333 bp, synthetic construct
  source 1..333: mol_type = other DNA
gatattgtgatgactcagtctccactctccctgcccgtcacccctggagagccggcctccatctcctgcaggtctagtcagagcctcctgcatagtaatggatacaactatttggattggtacctgcagaagccagggcagtctccacagctcctgatctatttgggttctcatcgggcctccggggtccctgacaggttcagtggcagtggatcaggcacagattttacactgaaaatcagcagagtggaggctgaggatgttggggtttattactgcatgcaggcactccgagcccctacttttggcggagggaccaaggttgagatcaaa

SEQ ID NO: 2151 - protein, 111 aa, synthetic construct
DIVMTQSPLSLPVTPGEPASISCRSSQSLLHSNGYNYLDWYLQKPGQSPQLLIYLGSHRASGVPDRFSGSGSGTDFTLKISRVEAEDVGVYYCMQALRAPTFGGGTKVEIK

SEQ ID NO: 2152 - protein, 9 aa, synthetic construct
FTFGDYAMS

SEQ ID NO: 2153 - protein, 19 aa, synthetic construct
FIGSKAYGGTTEYTASVKG

SEQ ID NO: 2154 - protein, 13 aa, synthetic construct
ARGPRRYTYGMDV

SEQ ID NO: 2155 - protein, 11 aa, synthetic construct
RASQSISSYLN

SEQ ID NO: 2156 - protein, 7 aa, synthetic construct
AASSLQS

SEQ ID NO: 2157 - protein, 8 aa, synthetic construct
QQSSTPLT

SEQ ID NO: 2158 - protein, 26 aa, synthetic construct
EVQLVESGGGLVQPGRSLRLSCTASG

SEQ ID NO: 2159 - protein, 14 aa, synthetic construct
WFRQAPGKGLEWVG

SEQ ID NO: 2160 - protein, 30 aa, synthetic construct; identical to SEQ ID NO: 2052

SEQ ID NO: 2161 - protein, 11 aa, synthetic construct
WGQGTTVTVSS

SEQ ID NO: 2162 - DNA, 366 bp, synthetic construct
  source 1..366: mol_type = other DNA
gaggtgcagctggtggagtctgggggaggcttggtacagccagggcggtccctgagactctcctgtacagcttctggattcacctttggtgattatgctatgagctggttccgccaggctccagggaaggggctggagtgggtaggtttcattggaagcaaagcttatggtgggacaacagaatacaccgcgtctgtgaaaggcagattcaccatctcaagagatggttccaaaagcatcgcctatctgcaaatgaacagcctgaaaaccgaggacacggcggtgtactactgcgccagaggaccaagacgctacacatacggaatggacgtatggggccagggaacaactgtcaccgtctcctca

SEQ ID NO: 2163 - protein, 122 aa, synthetic construct
EVQLVESGGGLVQPGRSLRLSCTASGFTFGDYAMSWFRQAPGKGLEWVGFIGSKAYGGTTEYTASVKGRFTISRDGSKSIAYLQMNSLKTEDTAVYYCARGPRRYTYGMDVWGQGTTVTVSS

SEQ ID NO: 2164 - protein, 24 aa, synthetic construct
DIQMNTQSPSSLSASVGDRVTITC

SEQ ID NO: 2165 - protein, 15 aa, synthetic construct
WYQQKPGKAPKLLIY

SEQ ID NO: 2166 - protein, 32 aa, synthetic construct; identical to SEQ ID NO: 2058

SEQ ID NO: 2167 - protein, 10 aa, synthetic construct
FGGGTKVEIK

SEQ ID NO: 2168 - DNA, 318 bp, synthetic construct; identical to SEQ ID NO: 2060
  source 1..318: mol_type = other DNA

SEQ ID NO: 2169 - protein, 106 aa, synthetic construct; identical to SEQ ID NO: 2061

SEQ ID NO: 2170 - protein, 9 aa, synthetic construct
GTFSSYAIS

SEQ ID NO: 2171 - protein, 17 aa, synthetic construct
GIIPISGTANYAQKFQG

SEQ ID NO: 2172 - protein, 17 aa, synthetic construct
ARDTGRGYTRHFWKFDP

SEQ ID NO: 2173 - protein, 11 aa, synthetic construct
RASQSISSYLN

SEQ ID NO: 2174 - protein, 7 aa, synthetic construct
AASSLQS

SEQ ID NO: 2175 - protein, 8 aa, synthetic construct
QQSDILYT

SEQ ID NO: 2176 - protein, 26 aa, synthetic construct
QVQLVQSGAEVKKPGSSVKVSCKASG

SEQ ID NO: 2177 - protein, 14 aa, synthetic construct
WVRQAPGQGLEWMG

SEQ ID NO: 2178 - protein, 30 aa, synthetic construct; identical to SEQ ID NO: 2034

SEQ ID NO: 2179 - protein, 11 aa, synthetic construct
WGQGTLVTVSS

SEQ ID NO: 2180 - DNA, 369 bp, synthetic construct
  source 1..369: mol_type = other DNA
caggtgcagctggtgcagtctggggctgaggtgaagaagcctgggtcctcggtgaaggtctcctgcaaggcttctggaggcaccttcagcagctatgctatcagctgggtgcgacaggcccctggacaagggcttgagtggatgggagggatcatccctatctctggtacagcaaactacgcacagaagttccagggcagagtcacgattaccgcggacgaatccacgagcacagcctacatggagctgagcagcctgagatctgaggacacggcggtgtactactgcgccagagacacgggacggggatacaccagacacttctggtttgacccctggggacagggtacattggtcaccgtctcctca

SEQ ID NO: 2181 - protein, 123 aa, synthetic construct
QVQLVQSGAEVKKPGSSVKVSCKASGGTFSSYAISWVRQAPGQGLEWMGGIIPISGTANYAQKFQGRVTITADESTSTAYMELSSLRSEDTAVYYCARDTGRGYTRHFWFDPWGQGTLVTVSS

SEQ ID NO: 2182 - protein, 23 aa, synthetic construct
DIQMTQSPSSLSASVGDRVTITC

SEQ ID NO: 2183 - protein, 15 aa, synthetic construct
WYQQKPGKAPKLLIY

SEQ ID NO: 2184 - protein, 32 aa, synthetic construct; identical to SEQ ID NO: 2058

SEQ ID NO: 2185 - protein, 10 aa, synthetic construct
FGGGTKVEIK

SEQ ID NO: 2186 - DNA, 318 bp, synthetic construct; identical to SEQ ID NO: 2132
  source 1..318: mol_type = other DNA

SEQ ID NO: 2187 - protein, 106 aa, synthetic construct; identical to SEQ ID NO: 2133

SEQ ID NO: 2188 - protein, 9 aa, synthetic construct
GTFGNYAIS

SEQ ID NO: 2189 - protein, 17 aa, synthetic construct
GIIPIPGIANYAQKFQG

SEQ ID NO: 2190 - protein, 16 aa, synthetic construct
ARDTGRGYTRHFWFDP

SEQ ID NO: 2191 - protein, 11 aa, synthetic construct
RASQSISSYLN

SEQ ID NO: 2192 - protein, 7 aa, synthetic construct
AASSLQS

SEQ ID NO: 2193 - protein, 8 aa, synthetic construct
QQSDILYT

SEQ ID NO: 2194 - protein, 26 aa, synthetic construct
QVQLVQSGAEVKKPGSSVKVSCKASG

SEQ ID NO: 2195 - protein, 14 aa, synthetic construct
WVRQAPGQGLEWMG

SEQ ID NO: 2196 - protein, 30 aa, synthetic construct; identical to SEQ ID NO: 2034

SEQ ID NO: 2197 - protein, 11 aa, synthetic construct
WGQGTLVTVSS

SEQ ID NO: 2198 - DNA, 369 bp, synthetic construct
  source 1..369: mol_type = other DNA
caggtgcagctggtgcagtctggggctgaggtgaagaagcctgggtcctcggtgaaggtctcctgcaaggcttctggaggcaccttcggaaactatgctatcagctgggtgcgacaggcccctggacaagggcttgagtggatgggagggatcatccctatcccaggtatcgcaaactacgcacagaagttccagggcagagtcacgattaccgcggacgaatccacgagcacagcctacatggagctgagcagcctgagatctgaggacacggcggtgtactactgcgccagagacacgggacggggatacaccagacacttctggtttgacccctggggacagggtacattggtcaccgtctcctca

SEQ ID NO: 2199 - protein, 123 aa, synthetic construct
QVQLVQSGAEVKKPGSSVKVSCKASGGTFGNYAISWVRQAPGQGLEWMGGIIPIPGIANYAQKFQGRVTITADESTSTAYMELSSLRSEDTAVYYCARDTGRGYTRHFWFDPWGQGTLVTVSS

SEQ ID NO: 2200 - protein, 23 aa, synthetic construct
DIQMTQSPSSLSASVGDRVTITC

SEQ ID NO: 2201 - protein, 15 aa, synthetic construct
WYQQKPGKAPKLLIY

SEQ ID NO: 2202 - protein, 32 aa, synthetic construct; identical to SEQ ID NO: 2058

SEQ ID NO: 2203 - protein, 10 aa, synthetic construct
FGGGTKVEIK

SEQ ID NO: 2204 - DNA, 318 bp, synthetic construct; identical to SEQ ID NO: 2132
  source 1..318: mol_type = other DNA

SEQ ID NO: 2205 - protein, 106 aa, synthetic construct; identical to SEQ ID NO: 2133

SEQ ID NO: 2206 - protein, 9 aa, synthetic construct
GTFSSAAIS

SEQ ID NO: 2207 - protein, 17 aa, synthetic construct
GIFPISGHANYAQKFQG

SEQ ID NO: 2208 - protein, 16 aa, synthetic construct
ARDTGRGYTRHFWFDP

SEQ ID NO: 2209 - protein, 11 aa, synthetic construct
RASQSISSYLN

SEQ ID NO: 2210 - protein, 7 aa, synthetic construct
AASSLQS

SEQ ID NO: 2211 - protein, 8 aa, synthetic construct
QQSDILYT

SEQ ID NO: 2212 - protein, 26 aa, synthetic construct
QVQLVQSGAEVKKPGSSVKVSCKASG

SEQ ID NO: 2213 - protein, 14 aa, synthetic construct
WVRQAPGQGLEWMG

SEQ ID NO: 2214 - protein, 30 aa, synthetic construct; identical to SEQ ID NO: 2034

SEQ ID NO: 2215 - protein, 11 aa, synthetic construct
WGQGTLVTVSS

SEQ ID NO: 2216 - DNA, 369 bp, synthetic construct
  source 1..369: mol_type = other DNA
caggtgcagctggtgcagtctggggctgaggtgaagaagcctgggtcctcggtgaaggtctcctgcaaggcttctggaggcaccttcagcagcgccgctatcagctgggtgcgacaggcccctggacaagggctcgagtggatgggagggatcttccctatctccggtcacgcaaactacgcacagaagttccagggcagagtcacgattaccgcggacgaatccacgagcacagcctacatggagctgagcagcctgagatctgaggacacggcggtgtactactgcgccagagacacgggacggggatacaccagacacttctggtttgacccctggggacagggtacattggtcaccgtctcctca

SEQ ID NO: 2217 - protein, 123 aa, synthetic construct
QVQLVQSGAEVKKPGSSVKVSCKASGGTFSSAAISWVRQAPGQGLEWMGGIFPISGHANYAQKFQGRVTITADESTSTAYMELSSLRSEDTAVYYCARDTGRGYTRHFWFDPWGQGTLVTVSS

SEQ ID NO: 2218 - protein, 23 aa, synthetic construct
DIQMTQSPSSLSASVGDRVTITC

SEQ ID NO: 2219 - protein, 15 aa, synthetic construct
WYQQKPGKAPKLLIY

SEQ ID NO: 2220 - protein, 32 aa, synthetic construct; identical to SEQ ID NO: 2058

SEQ ID NO: 2221 - protein, 10 aa, synthetic construct
FGGGTKVEIK

SEQ ID NO: 2222 - DNA, 318 bp, synthetic construct; identical to SEQ ID NO: 2132
  source 1..318: mol_type = other DNA

SEQ ID NO: 2223 - protein, 106 aa, synthetic construct; identical to SEQ ID NO: 2133

SEQ ID NO: 2224 - protein, 9 aa, synthetic construct
GTFATYAIS

SEQ ID NO: 2225 - protein, 17 aa, synthetic construct
GIFPLSGTANYAQKFQG

SEQ ID NO: 2226 - protein, 16 aa, synthetic construct
ARDTGRGYTRHFWFDP

SEQ ID NO: 2227 - protein, 11 aa, synthetic construct
RASQSISSYLN

SEQ ID NO: 2228 - protein, 7 aa, synthetic construct
AASSLQS

SEQ ID NO: 2229 - protein, 8 aa, synthetic construct
QQSDILYT

SEQ ID NO: 2230 - protein, 26 aa, synthetic construct
QVQLVQSGAEVKKPGSSVKVSCKASG

SEQ ID NO: 2231 - protein, 14 aa, synthetic construct
WVRQAPGQGLEWMG

SEQ ID NO: 2232 - protein, 30 aa, synthetic construct; identical to SEQ ID NO: 2034

SEQ ID NO: 2233 - protein, 11 aa, synthetic construct
WGQGTLVTVSS

SEQ ID NO: 2234 - DNA, 369 bp, synthetic construct
  source 1..369: mol_type = other DNA
caggtgcagctggtgcagtctggggctgaggtgaagaagcctgggtcctcggtgaaggtctcctgcaaggcttctggaggcaccttcgcaacctatgctatcagctgggtgcgacaggcccctggacaagggcttgagtggatgggagggatcttccctctctccggtacagcaaactacgcacagaagttccagggcagagtcacgattaccgcggacgaatccacgagcacagcctacatggagctgagcagcctgagatctgaggacacggcggtgtactactgcgccagagacacgggacggggatacaccagacacttctggtttgacccctggggacagggtacattggtcaccgtctcctca

SEQ ID NO: 2235 - protein, 123 aa, synthetic construct
QVQLVQSGAEVKKPGSSVKVSCKASGGTFATYAISWVRQAPGQGLEWMGGIFPLSGTANYAQKFQGRVTITADESTSTAYMELSSLRSEDTAVYYCARDTGRGYTRHFWFDPWGQGTLVTVSS

SEQ ID NO: 2236 - protein, 23 aa, synthetic construct
DIQMTQSPSSLSASVGDRVTITC

SEQ ID NO: 2237 - protein, 15 aa, synthetic construct
WYQQKPGKAPKLLIY

SEQ ID NO: 2238 - protein, 32 aa, synthetic construct; identical to SEQ ID NO: 2058

SEQ ID NO: 2239 - protein, 10 aa, synthetic construct
FGGGTKVEIK

SEQ ID NO: 2240 - DNA, 318 bp, synthetic construct; identical to SEQ ID NO: 2132
  source 1..318: mol_type = other DNA

SEQ ID NO: 2241 - protein, 106 aa, synthetic construct; identical to SEQ ID NO: 2133

SEQ ID NO: 2242 - protein, 8 aa, synthetic construct
GGTFSSYA

SEQ ID NO: 2243 - protein, 8 aa, synthetic construct
IIPIFGTA

SEQ ID NO: 2244 - protein, 13 aa, synthetic construct
AREEVSSPYGMDV

SEQ ID NO: 2245 - protein, 9 aa, synthetic construct
TGAVTSGHY

SEQ ID NO: 2246 - protein, 10 aa, synthetic construct
LLSYSGASWV

SEQ ID NO: 2247 - protein, 8 aa, synthetic construct
GGTFSSSA

SEQ ID NO: 2248 - protein, 8 aa, synthetic construct
IIPIYGIT

SEQ ID NO: 2249 - protein, 22 aa, synthetic construct
ARDDTARRVRGVPYYYYYAMDV

SEQ ID NO: 2250 - protein, 6 aa, synthetic construct
QGIGNY

SEQ ID NO: 2251 - protein, 9 aa, synthetic construct
QQLKDYPIT

SEQ ID NO: 2252 - protein, 8 aa, synthetic construct
GFSLSHFS

SEQ ID NO: 2253 - protein, 8 aa, synthetic construct
FDPEEGGT

SEQ ID NO: 2254 - protein, 14 aa, synthetic construct
ATGIWYSSGWPVDY

SEQ ID NO: 2255 - protein, 11 aa, synthetic construct
QSLLDSSGYNY

SEQ ID NO: 2256 - protein, 9 aa, synthetic construct
MQALQTPIT

SEQ ID NO: 2257 - protein, 8 aa, synthetic construct
GYTLTELS

SEQ ID NO: 2258 - protein, 8 aa, synthetic construct
FDPEDGET

SEQ ID NO: 2259 - protein, 18 aa, synthetic construct
ATVSRVRGVINYYYYMDV

SEQ ID NO: 2260 - protein, 11 aa, synthetic construct
QSLLYRNGNNY

SEQ ID NO: 2261 - protein, 9 aa, synthetic construct
MQALQTPPT

SEQ ID NO: 2262 - protein, 6 aa, synthetic construct
QSVDSS

SEQ ID NO: 2263 - protein, 9 aa, synthetic construct
QQYKDWPFT

SEQ ID NO: 2264 - protein, 8 aa, synthetic construct
GGTFGTYA

SEQ ID NO: 2265 - protein, 8 aa, synthetic construct
ITPISATI

SEQ ID NO: 2266 - protein, 13 aa, synthetic construct
ARGFEYSDGLLDD

SEQ ID NO: 2267 - protein, 12 aa, synthetic construct
QSLFYSDDGNTY

SEQ ID NO: 2268 - protein, 9 aa, synthetic construct
MQHMEFPLT

SEQ ID NO: 2269 - protein, 10 aa, synthetic construct
GGSISSSSYY

SEQ ID NO: 2270 - protein, 7 aa, synthetic construct
IYYSGST

SEQ ID NO: 2271 - protein, 15 aa, synthetic construct
ARGAWELRLGDWFDP

SEQ ID NO: 2272 - protein, 9 aa, synthetic construct
SSNIGAGYD

SEQ ID NO: 2273 - protein, 12 aa, synthetic construct
QSYDSSLSIYVV

SEQ ID NO: 2274 - protein, 9 aa, synthetic construct
SGSISSTNW

SEQ ID NO: 2275 - protein, 7 aa, synthetic construct
IYHSGST

SEQ ID NO: 2276 - protein, 10 aa, synthetic construct
ARVGPAAIYY

SEQ ID NO: 2277 - protein, 8 aa, synthetic construct
SNNVGYEG

SEQ ID NO: 2278 - protein, 11 aa, synthetic construct
SAWDSSLNAVV

SEQ ID NO: 2279 - protein, 21 aa, synthetic construct
ATAKPGIAVAGQNYYYYYMDV

SEQ ID NO: 2280 - protein, 8 aa, synthetic construct
GFTFSSYA

SEQ ID NO: 2281 - protein, 8 aa, synthetic construct
ISYDGSNK

SEQ ID NO: 2282 - protein, 17 aa, synthetic construct
ASSPIGYSYGYWGGMDV

SEQ ID NO: 2283 - protein, 9 aa, synthetic construct
SGIDVRTNK

SEQ ID NO: 2284 - protein, 7 aa, synthetic construct
FQSDSDK

SEQ ID NO: 2285 - protein, 9 aa, synthetic construct
LIWHTSGWV

SEQ ID NO: 2286 - protein, 17 aa, synthetic construct
ATGPAAAGVGYYYYMDV

SEQ ID NO: 2287 - protein, 11 aa, synthetic construct
QSLLYRNGYNY

SEQ ID NO: 2288 - protein, 20 aa, synthetic construct
ARDVMVYCSSTSCYFYGMDV

SEQ ID NO: 2289 - protein, 6 aa, synthetic construct
QDIRDY

SEQ ID NO: 2290 - protein, 9 aa, synthetic construct
QQFENLPIT

SEQ ID NO: 2291 - protein, 18 aa, synthetic construct
ATGGYSSGFNYYYYYMDV

SEQ ID NO: 2292 - protein, 14 aa, synthetic construct
ATGVTTYYYYGMDV

SEQ ID NO: 2293 - protein, 11 aa, synthetic construct
QSLLYSNGNNF

SEQ ID NO: 2294 - protein, 8 aa, synthetic construct
GFTFSSYG

SEQ ID NO: 2295 - protein, 8 aa, synthetic construct
IRYDGSNK

SEQ ID NO: 2296 - protein, 14 aa, synthetic construct
ARDLFDFWWDGMDV

SEQ ID NO: 2297 - protein, 7 aa, synthetic construct
QSVSSMY

SEQ ID NO: 2298 - protein, 10 aa, synthetic construct
QQYVSSPMYT

SEQ ID NO: 2299 - protein, 6 aa, synthetic construct
QSVSSY

SEQ ID NO: 2300 - protein, 9 aa, synthetic construct
QQYDDWPQT

SEQ ID NO: 2301 - protein, 8 aa, synthetic construct
GGTFNNYG

SEQ ID NO: 2302 - protein, 8 aa, synthetic construct
IIPLFGTT

SEQ ID NO: 2303 - protein, 15 aa, synthetic construct
ARDRMAADGMAVFDY

SEQ ID NO: 2304 - protein, 8 aa, synthetic construct
SSNIGRHF

SEQ ID NO: 2305 - protein, 11 aa, synthetic construct
SSWDAALNGVV

SEQ ID NO: 2306 - protein, 19 aa, synthetic construct
ATEVPMVRGARRYYYYMDV

SEQ ID NO: 2307 - protein, 11 aa, synthetic construct
QTLLYINENNY

SEQ ID NO: 2308 - protein, 9 aa, synthetic construct
MQGLQTPPT

SEQ ID NO: 2309 - protein, 10 aa, synthetic construct
GGSISNSNYY

SEQ ID NO: 2310 - protein, 15 aa, synthetic construct
ARGAWELSLGDWFDP

SEQ ID NO: 2311 - protein, 12 aa, synthetic construct
QSYDSSLSVYVV

SEQ ID NO: 2312 - protein, 6 aa, synthetic construct
QNVYGE

SEQ ID NO: 2313 - protein, 9 aa, synthetic construct
QQRRDWPIT

SEQ ID NO: 2314 - protein, 8 aa, synthetic construct
GFTFGTSS

SEQ ID NO: 2315 - protein, 8 aa, synthetic construct
ISFDGTEI

SEQ ID NO: 2316 - protein, 15 aa, synthetic construct
AKGSGNIYFYSGMDV

SEQ ID NO: 2317 - protein, 6 aa, synthetic construct
QSISGW

SEQ ID NO: 2318 - protein, 9 aa, synthetic construct
QQYYSYPLT

SEQ ID NO: 2319 - protein, 19 aa, synthetic construct
ATGVPAAIGVYYYYYYMDV

SEQ ID NO: 2320 - protein, 11 aa, synthetic construct
QSLLYSNGYNY

SEQ ID NO: 2321 - protein, 9 aa, synthetic construct
MQALQSPVT

SEQ ID NO: 2322 - protein, 20 aa, synthetic construct
ATDSRDGPAARGGYYYYMDV

SEQ ID NO: 2323 - protein, 11 aa, synthetic construct
QSLLYINGYNY

SEQ ID NO: 2324 - protein, 20 aa, synthetic construct
ARDAYYYDSSGYYNPDAFDI

SEQ ID NO: 2325 - protein, 11 aa, synthetic construct
QSLLHSNGYNY

SEQ ID NO: 2326 - protein, 9 aa, synthetic construct
MQGLQTPRT

SEQ ID NO: 2327 - protein, 10 aa, synthetic construct
GFSLTSGGMS

SEQ ID NO: 2328 - protein, 7 aa, synthetic construct
IDWNDDK

SEQ ID NO: 2329 - protein, 12 aa, synthetic construct
ARIRGMTWGFDS

SEQ ID NO: 2330 - protein, 7 aa, synthetic construct
QSVSSSY

SEQ ID NO: 2331 - protein, 9 aa, synthetic construct
QQYGTTPFA

SEQ ID NO: 2332 - protein, 8 aa, synthetic construct
GYTFTAYY

SEQ ID NO: 2333 - protein, 8 aa, synthetic construct
INPNSGGT

SEQ ID NO: 2334 - protein, 21 aa, synthetic construct
ARDGAFYYGSENYYNAGWFDP

SEQ ID NO: 2335 - protein, 11 aa, synthetic construct
QSLLSGNGYNY

SEQ ID NO: 2336 - protein, 9 aa, synthetic construct
MQALKSPLT

SEQ ID NO: 2337 - protein, 8 aa, synthetic construct
GYTFTNYY

SEQ ID NO: 2338 - protein, 8 aa, synthetic construct
INPSGGIT

SEQ ID NO: 2339 - protein, 18 aa, synthetic construct
ARAGLGYNWNYAPSGMDV

SEQ ID NO: 2340 - protein, 9 aa, synthetic construct
SSDVGGYNY

SEQ ID NO: 2341 - protein, 10 aa, synthetic construct
SSYAGSNNLV

SEQ ID NO: 2342 - protein, 8 aa, synthetic construct
GFTFDDYA

SEQ ID NO: 2343 - protein, 8 aa, synthetic construct
ISWNSGSI

SEQ ID NO: 2344 - protein, 15 aa, synthetic construct
AKDVNRILVAGMVDY

SEQ ID NO: 2345 - protein, 9 aa, synthetic construct
MQGLQTPIT

SEQ ID NO: 2346 - protein, 8 aa, synthetic construct
RFTFEDYA

SEQ ID NO: 2347 - protein, 8 aa, synthetic construct
ISWKSGGI

SEQ ID NO: 2348 - protein, 15 aa, synthetic construct
VKDPTLVATDRAFNI

SEQ ID NO: 2349 - protein, 9 aa, synthetic construct
MQYLQTPDT

SEQ ID NO: 2350 - protein, 12 aa, synthetic construct
QSLLDSDDGNIH

SEQ ID NO: 2351 - protein, 9 aa, synthetic construct
MQRKEFPLT

SEQ ID NO: 2352 - protein, 18 aa, synthetic construct
AKEDRLRFLEWLFYGMDV

SEQ ID NO: 2353 - protein, 6 aa, synthetic construct
HDIYTY

SEQ ID NO: 2354 - protein, 11 aa, synthetic construct
QQYDNHPPEVT

SEQ ID NO: 2355 - protein, 6 aa, synthetic construct
QDIDDD

SEQ ID NO: 2356 - protein, 9 aa, synthetic construct
LQHDNLPLT

SEQ ID NO: 2357 - protein, 19 aa, synthetic construct
ATEDPGPVAGPYYYYGMDV

SEQ ID NO: 2358 - protein, 11 aa, synthetic construct
QSLLYINGYHY

SEQ ID NO: 2359 - protein, 8 aa, synthetic construct
GYMFTNYP

SEQ ID NO: 2360 - protein, 8 aa, synthetic construct
INAGTGNT

SEQ ID NO: 2361 - protein, 21 aa, synthetic construct
AREGMFYYGLESYYKGGWFDP

SEQ ID NO: 2362 - protein, 11 aa, synthetic construct
QSLLHRNGYNY

SEQ ID NO: 2363 - protein, 9 aa, synthetic construct
MQALQTPLT

SEQ ID NO: 2364 - protein, 12 aa, synthetic construct
QSLLDSDDGNTY

SEQ ID NO: 2365 - protein, 9 aa, synthetic construct
MQRLQFPLT

SEQ ID NO: 2366 - protein, 8 aa, synthetic construct
TYTFTTYY

SEQ ID NO: 2367 - protein, 8 aa, synthetic construct
IYPSGGNT

SEQ ID NO: 2368 - protein, 13 aa, synthetic construct
VRDQNYYYSAMDV

SEQ ID NO: 2369 - protein, 6 aa, synthetic construct
QDIRNY

SEQ ID NO: 2370 - protein, 6 aa, synthetic construct
RDISDS

SEQ ID NO: 2371 - protein, 9 aa, synthetic construct
HQYDNLPLT

SEQ ID NO: 2372 - protein, 8 aa, synthetic construct
GFNFRGYA

SEQ ID NO: 2373 - protein, 8 aa, synthetic construct
ISGSGGTT

SEQ ID NO: 2374 - protein, 15 aa, synthetic construct
AQSYAQIGYGGHIDH

SEQ ID NO: 2375 - protein, 9 aa, synthetic construct
SGIDVATYM

SEQ ID NO: 2376 - protein, 7 aa, synthetic construct
YKSDSDK

SEQ ID NO: 2377 - protein, 9 aa, synthetic construct
LIWHGSHYV

SEQ ID NO: 2378 - protein, 9 aa, synthetic construct
MQAVQNPPT

SEQ ID NO: 2379 - protein, 6 aa, synthetic construct
QNIDSS

SEQ ID NO: 2380 - protein, 9 aa, synthetic construct
HQSSSLPLT

SEQ ID NO: 2381 - protein, 7 aa, synthetic construct
QSVYNNY

SEQ ID NO: 2382 - protein, 10 aa, synthetic construct
QQYNSWPPYT

SEQ ID NO: 2383 - protein, 9 aa, synthetic construct
MQARQTPYT

SEQ ID NO: 2384 - protein, 6 aa, synthetic construct
ESVTTF

SEQ ID NO: 2385 - protein, 9 aa, synthetic construct
HQHTNWPLT

SEQ ID NO: 2386 - protein, 22 aa, synthetic construct
ATEVGYCSGGSCYISYYYGMDV

SEQ ID NO: 2387 - protein, 11 aa, synthetic construct
QSLLYRNGHNF

SEQ ID NO: 2388 - protein, 6 aa, synthetic construct
QTMNNY

SEQ ID NO: 2389 - protein, 10 aa, synthetic construct
QQYGDWLPIT

SEQ ID NO: 2390 - protein, 17 aa, synthetic construct
ATAFPEATISYYYYMDV

SEQ ID NO: 2391 - protein, 12 aa, synthetic construct
RSLLDSDDGNTH

SEQ ID NO: 2392 - protein, 21 aa, synthetic construct
ARGPWYYDSSGYSSYAYYMDV

SEQ ID NO: 2393 - protein, 11 aa, synthetic construct
QSLLHSDGYNY

SEQ ID NO: 2394 - protein, 10 aa, synthetic construct
MQALHTPGVT

SEQ ID NO: 2395 - protein, 120 aa, synthetic construct; identical to SEQ ID NO: 1820

SEQ ID NO: 2396 - protein, 8 aa, synthetic construct
GFTFSSYA

SEQ ID NO: 2397 - protein, 8 aa, synthetic construct
ITGGGRNT

SEQ ID NO: 2398 - protein, 13 aa, synthetic construct
TRQGYDGYTWFAY

SEQ ID NO: 2399 - protein, 447 aa, synthetic construct; identical to SEQ ID NO: 1824

SEQ ID NO: 2400 - protein, 112 aa, synthetic construct; identical to SEQ ID NO: 1825

SEQ ID NO: 2401 - protein, 10 aa, synthetic construct
ESVDNSGISF

SEQ ID NO: 2402 - skipped

SEQ ID NO: 2403 - protein, 9 aa, synthetic construct
QQSKEVPWT

SEQ ID NO: 2404 - protein, 218 aa, synthetic construct; identical to SEQ ID NO: 1829

SEQ ID NO: 2405 - protein, 113 aa, synthetic construct [sequence omitted]

SEQ ID NO: 2406 - protein, 8 aa, synthetic construct
GITFSNSG

SEQ ID NO: 2407 - protein, 8 aa, synthetic construct
IWYDGSKR

SEQ ID NO: 2408 - protein, 6 aa, synthetic construct
ATNDDY

SEQ ID NO: 2409 - protein, 440 aa, synthetic construct; identical to SEQ ID NO: 1834

SEQ ID NO: 2410 - protein, 108 aa, synthetic construct; identical to SEQ ID NO: 1835

SEQ ID NO: 2411 - protein, 6 aa, synthetic construct
QSVSSY

SEQ ID NO: 2412 - skipped

SEQ ID NO: 2413 - protein, 9 aa, synthetic construct
QQSSNWPRT

SEQ ID NO: 2414 - protein, 214 aa, synthetic construct; identical to SEQ ID NO: 1839

SEQ ID NO: 2415 - protein, 121 aa, synthetic construct; identical to SEQ ID NO: 1840

SEQ ID NO: 2416 - protein, 5 aa, synthetic construct
RYWMS

SEQ ID NO: 2417 - protein, 17 aa, synthetic construct
NIKQDGSEKYYVDSVKG

SEQ ID NO: 2418 - protein, 11 aa, synthetic construct
EGGWFGELAFD

SEQ ID NO: 2419 - protein, 108 aa, synthetic construct; identical to SEQ ID NO: 1844

SEQ ID NO: 2420 - protein, 12 aa, synthetic construct
RASQRVSSSYLA

SEQ ID NO: 2421 - protein, 7 aa, synthetic construct
DASSRAT

SEQ ID NO: 2422 - protein, 9 aa, synthetic construct
QQYGSLPWT

SEQ ID NO: 2423 - protein, 447 aa, synthetic construct; identical to SEQ ID NO: 1848

SEQ ID NO: 2424 - protein, 214 aa, synthetic construct; identical to SEQ ID NO: 1849

SEQ ID NO: 2425 - protein, 118 aa, synthetic construct; identical to SEQ ID NO: 1850

SEQ ID NO: 2426 - protein, 10 aa, synthetic construct
GFTFSDSWIH

SEQ ID NO: 2427 - protein, 18 aa, synthetic construct
AWISPYGGSTYYADSVKG

SEQ ID NO: 2428 - protein, 9 aa, synthetic construct
RHWPGGFDY

SEQ ID NO: 2429 - protein, 108 aa, synthetic construct; identical to SEQ ID NO: 1854

SEQ ID NO: 2430 - protein, 11 aa, synthetic construct
RASQDVSTAVA

SEQ ID NO: 2431 - protein, 7 aa, synthetic construct
SASFLYS

SEQ ID NO: 2432 - protein, 9 aa, synthetic construct
QQYLYHPAT

SEQ ID NO: 2433 - protein, 122 aa, synthetic construct; identical to SEQ ID NO: 1858

SEQ ID NO: 2434 - protein, 108 aa, synthetic construct; identical to SEQ ID NO: 1854

SEQ ID NO: 2435 - protein, 118 aa, synthetic construct [sequence omitted]

SEQ ID NO: 2436 - protein, 108 aa, synthetic construct; identical to SEQ ID NO: 1854

SEQ ID NO: 2437 - protein, 118 aa, synthetic construct; identical to SEQ ID NO: 1862

SEQ ID NO: 2438 - protein, 118 aa, synthetic construct; identical to SEQ ID NO: 1863

SEQ ID NO: 2439 - protein, 118 aa, synthetic construct; identical to SEQ ID NO: 1864

SEQ ID NO: 2440 - protein, 108 aa, synthetic construct; identical to SEQ ID NO: 1854

SEQ ID NO: 2441 - protein, 108 aa, synthetic construct; identical to SEQ ID NO: 1866

SEQ ID NO: 2442 - protein, 108 aa, synthetic construct; identical to SEQ ID NO: 1867

SEQ ID NO: 2443 - protein, 108 aa, synthetic construct; identical to SEQ ID NO: 1868

SEQ ID NO: 2444 - protein, 108 aa, synthetic construct; identical to SEQ ID NO: 1869

SEQ ID NO: 2445 - protein, 108 aa, synthetic construct; identical to SEQ ID NO: 1870

SEQ ID NO: 2446 - protein, 108 aa, synthetic construct; identical to SEQ ID NO: 1871

SEQ ID NO: 2447 - protein, 108 aa, synthetic construct; identical to SEQ ID NO: 1872

SEQ ID NO: 2448 - protein, 107 aa, synthetic construct; identical to SEQ ID NO: 1873

SEQ ID NO: 2449 - protein, 108 aa, synthetic construct; identical to SEQ ID NO: 1874

SEQ ID NO: 2450 - protein, 108 aa, synthetic construct; identical to SEQ ID NO: 1875

SEQ ID NO: 2451 - protein, 108 aa, synthetic construct; identical to SEQ ID NO: 1876

SEQ ID NO: 2452 - protein, 108 aa, synthetic construct; identical to SEQ ID NO: 1877

SEQ ID NO: 2453 - protein, 108 aa, synthetic construct; identical to SEQ ID NO: 1878

SEQ ID NO: 2454 - protein, 108 aa, synthetic construct; identical to SEQ ID NO: 1879

SEQ ID NO: 2455 - protein, 108 aa, synthetic construct; identical to SEQ ID NO: 1880

SEQ ID NO: 2456 - protein, 450 aa, synthetic construct; identical to SEQ ID NO: 1881

SEQ ID NO: 2457 - protein, 216 aa, synthetic construct; identical to SEQ ID NO: 1882

SEQ ID NO: 2458 - protein, 118 aa, synthetic construct; identical to SEQ ID NO: 1850

SEQ ID NO: 2459 - protein, 106 aa, synthetic construct; identical to SEQ ID NO: 1884

SEQ ID NO: 2460 - protein, 448 aa, synthetic construct; identical to SEQ ID NO: 1885

SEQ ID NO: 2461 - protein, 214 aa, synthetic construct; identical to SEQ ID NO: 1886

1. A method of modulating the tumor microenvironment in a patient comprising administering a composition comprising an anti-IL18-BP (interleukin-18 binding protein) antibody, and wherein the said tumor microenvironment is modulated as compared to the tumor microenvironment in an untreated patient or in a control treated patient.

2. The method of claim 1, wherein the modulation comprises
(i) infiltration of the tumor microenvironment by CD45+ cells;
(ii) an increase in CD3+ cells, CD4+ cells, and CD8+ cells in the lymphoid compartment;
(iii) an increase in the percentage of effector CD8+ cells in the tumor microenvironment;
(iv) induction of multifunctional granzyme B+IFNγ+-secreting CD8+ cells;
(v) induction of TNFα- and TNFα+IFNγ+-secreting NK cells;
(vi) induction of DC2 cells;
(vii) increasing levels of IFNγ, TNFα, and IL-12p70 cytokines;
(viii) increased secretion of CXCL9 and IFNγ-regulated cytokine;
(ix) increased MIP-1α secretion;
(x) decreased IL1b secretion;
(xi) an increase in the proportion of T cells in tumors;
(xii) increased effector polyfunctional CD8+ T cells that express perforin, multiple granzymes, and IFNγ;
(xiii) an increased in number of proliferating CD8+ T cells;
(xiv) a shift in the T cell compartment from naïve T cells towards cytotoxic CD8 effector T cells, optionally wherein the modulation further comprises T cell clonal expansion, optionally wherein the T cell clonal expansion comprises expansion above 3 cells per clone or expansion of GZMB-high and proliferating CD8+ T cells;
(xv) increased CD8+ T cell infiltration in the tumor microenvironment but not in serum or spleen;
(xvi) increased IFNγ secretion in the tumor microenvironment but not in serum or spleen;
(xvii) increased secretion of IL2 and TNFα from CD4+ T cells;
(xviii) increased secretion of IFNγ+, IL2+, and granzyme B+ from CD8+ T cells;
(xix) an increase in inflammatory MHCII^{high}C1ga+ and Nos2⁺ macrophages in the monocyte and macrophage compartment;
(xx) an increase in activated dendritic cells in the monocyte and macrophage compartment;
(xxi) a decrease in MHCII^{low}C1ga+ macrophages, suppressive Mrc1⁺ macrophages, Ifit⁺ MonoMacs and low-activated DCs in the monocyte and macrophage compartment;
(xxii) an increase in inflammatory myeloid cells;
(xxiii) an increase in IL18 not bound to IL-18BP in tumor microenvironment cell populations sufficient to enhance immunoreactivity upon administration, wherein immunoreactivity is measured as activation of T cells and NK cells; or
(xxiv) increasing the proportion of the cell populations of myeloid lineage that develop into proinflammatory macrophages.

3.-30. (canceled)

31. A method of treating cancer in a patient, comprising administering a composition comprising an anti-IL18-BP antibody, wherein said anti-IL18-BP antibody activates T cells, NK cells, NKT cells, Dendritic cells, MAIT T cells, 76 T cells, and/or innate lymphoid cells (ILCs), and/or modulates Myeloid cells, thereby said cancer is treated,
optionally wherein
(i) the T-cell is cytotoxic T-cell (CTL); optionally wherein the T-cell is CD4+ T-cell or CD8+ T-cell; or
(ii) the NK-cell is CD16+ lymphocyte or CD56+NK cell.

32. A method of activating a cell selected from the group consisting of T-cell, NK-cell, NKT-cell, dendritic cell, MAIT T cell, γδ T cell, and ILC of a patient, or modulating a myeloid cell of a patient comprising administering a composition comprising an anti-IL18-BP antibody, and wherein said cell is activated or modulated:
optionally wherein
(i) the T-cell is cytotoxic T-cell (CTL); optionally wherein the T-cell is CD4+ T-cell or CD8+ T-cell; or
(ii) the NK-cell is CD16+ lymphocyte or CD56+NK cell.

33.-39. (canceled)

40. The method of claim 1, wherein said anti-IL18-BP antibody increases IL-18 mediated immuno-stimulating activity in the TME, and/or lymph nodes.

41. The method of claim 32, wherein said anti-IL18-BP antibody restores IL-18 activity on T cells, NK cells, NKT cells, Myeloid cells, Dendritic cells, and/or innate lymphoid cells (TLCs).

42.-45. (canceled)

46. The method of claim 31, wherein said patient exhibits an increase in tumor growth inhibition, or a decrease in tumor growth of at least about 10%, 20%, 30%, 40%, 50%, 60%, 70%, 80%, 90%, 100%, 125%, 150%, 175%, 200%, 225%, 250%, 275%, 300%, 325%, 350%, 375%, 400%, 425%, 450%, 475%, 500%, 525%, 550%, 575%, 600%, 625%, 650%, 675%, 700%, 725%, 750%, 775%, 800%, 825%, 850%, 875%, 900%, 925%, 950%, 975%, or 1000%, as compared to a control or an untreated patient.

47.-49. (canceled)

50. The method of claim 32, wherein said activation is measured as an increase in expression of one or more activation markers, optionally wherein the activation markers are selected from the group consisting of CD107a, CD137, CD69, granzyme, and perforin.

51. (canceled)

52. The method of claim 32, wherein said activation is measured as
(i) an increase in proliferation of said NK-cells,
(ii) an increase in secretion of one or more cytokines, optionally wherein said one or more cytokines is selected from the group consisting of IFNγ, TNF, GMCSF, MIG (CXCL9), IP-10 (CXCL10) and MCP1 (CCL2); or
(iii) an increase in direct killing of target cells.

53.-55. (canceled)

56. The method of claim 31, further comprising administering a second antibody,
optionally wherein the second antibody is an antibody that binds to and/or inhibits a human checkpoint receptor protein;
optionally wherein the second antibody is selected from the group consisting of an anti-PVRIG antibody, an anti-PD-1 antibody, an anti-PD-L1 antibody, an anti-TIGIT antibody, an anti-CTLA-4 antibody, an anti-PD-L2 antibody, an anti-B7-H3 antibody, an anti B7-H4 antibody, an anti-CEACAM-1 antibody, an anti-PVR antibody, an anti-LAG3 antibody, an anti-CD112 antibody, an anti-CD96 antibody, an anti-TIM3 antibody, an anti-BTLA antibody, an anti-ICOS antibody, an anti-OX40 antibody, or an anti-41BB antibody, an anti-CD27 antibody, or an anti-GITR antibody;
optionally wherein the anti-IL18-BP antibody and the second antibody are administered sequentially or simultaneously, in any order, and in one or more formulations; or
optionally wherein:
(I) the PVRIG antibody
(i) is selected from the group consisting of CHA.7.518.1.H4(S241P) and CHA.7.538.1.2.H4(S241P);
(ii) comprises: a heavy chain variable domain comprising the vhCDR1, vhCDR2, and vhCDR3 from CHA.7.518.1.H4(S241P) (SEQ ID NO: 260), and a light chain variable domain comprising the vlCDR1, vlCDR2, and vlCDR3 from CHA.7.518.1.H4(S241P) (SEQ ID NO: 265);
(iii) comprises: a heavy chain variable domain comprising the vhCDR1, vhCDR2, and vhCDR3 from CHA.7.538.1.2.H4(S241P) (SEQ ID NO: 270), and a light chain variable domain comprising the vlCDR1, vlCDR2, and vlCDR3 from CHA.7.538.1.2.H4(S241P) (SEQ ID NO: 275);
(iv) comprises: a heavy chain variable domain comprising the vhCDR1, vhCDR2, and vhCDR3 from CHA.7.518.4 (SEQ ID NO: 1453), and a light chain variable domain comprising the vlCDR1, vlCDR2, and vlCDR3 from CHA.7.518.4 (SEQ ID NO: 1457); or
(v) is GSK4381562/SRF816 (GSK/Surface) or NTX2R13 (Nectin Therapeutics);
(II) the anti-TIGIT antibody
(i) is selected from the group consisting of CPA.9.083.H4(S241P) and CPA.9.086.H4(S241P);
(ii) comprises a heavy chain variable domain comprising the vhCDR1, vhCDR2, and vhCDR3 from CPA.9.083.H4(S241P) (SEQ ID NO: 350), and a light chain variable domain comprising the vlCDR1, vlCDR2, and vlCDR3 from CPA.9.083.H4(S241P) (SEQ ID NO: 355);
(iii) comprises a heavy chain variable domain comprising the vhCDR1, vhCDR2, and vhCDR3 from CPA.9.086.H4(S241P) (SEQ ID NO: 360), and a light chain variable domain comprising the vlCDR1, vlCDR2, and vlCDR3 from CPA.9.086.H4(S241P) (SEQ ID NO: 365);
(iv) comprises a heavy chain variable domain comprising the vhCDR1, vhCDR2, and vhCDR3 from CHA.9.547.18 (SEQ ID NO: 1177), and a light chain variable domain comprising the vlCDR1, vlCDR2, and vlCDR3 from CHA.9.547.18 (SEQ ID NO: 1181); or
(v) is selected from the group consisting of EOS-448 (GlaxoSmithKline, iTeos Therapeutics), BMS-986207, domvanalimab (AB154, Arcus Biosciences, Inc.), AB308 (Arcus Bioscience), Ociperlimab (aBGB-A1217, BeiGene), Tiragolumab (MTIG7192A, RocheGenentech), BAT6021 (Bio-Thera Solutions), BAT6005 (Bio-Thera Solutions), IBI939 (Innovent Biologics, US2021/00040201), JS006 (Junshi Bioscience/COHERUS), ASP8374 (Astellas Pharma Inc), Vibostolimab (MK-7684, Merck Sharp & Dohme), M6332 (Merck KGAA), Etigiliimab (OMP-313M32, Mereo BioPharma), SEA-TGT (Seagen)y, HB0030 (Huabo Biopharma), AK127 (AKESO), IBI939 (Innovent Biologics), and anti-TIGIT antibodies include the Genentech antibody (MTIG7192A);
(III) the anti-PD-1 antibody is selected from the group consisting of nivolumab (Opdivo®; BMS; CheckMate078), pembrolizumab (KEYTRUDA@; Merck), TSR-042 (Tesaro), cemiplimab (REGN2810; Regeneron Pharmaceuticals, see US20170174779), BMS-936559, Spartalizumab (PDR001, Novartis), pidilizumab (CT-011; Pfizer Inc), Tislelizumab (BGB-A317, BeiGene), Camrelizumab (SHR-1210, Incyte and Jiangsu HengRui), SHR-1210 (CTR20170299 and CTR20170322), SHR-1210 (CTR20160175 and CTR20170090), Sintilimab(Tyvyt®; Eli lily and Innovent Biologics), Toripalimab (JS001, Shanghai Junshi Bioscience), JS-001 (CTR20160274), IBI308 (CTR20160735), BGB-A317 (CTR20160872), Penpulimab (AK105, Akeso Biopharma), Zimberelimab (Arcus), BAT1306 (Bio-Thera Solutions Ltd), Sasanlimab (PF-06801591, pfizer), Dostarlimab-gxly (GlaxoSmithKline LLC), Prolgolimab (Biocad), Cadonilimab (Akeso Inc), Geptanolimab (Genor BioPharma Co Ltd), Serplulimab (Shanghai Henlius Biotech Inc), Balstilimab (Agenus Inc), Retifanlimab (Incyte Corp), Cetrelimab (Johnson & Johnson), CS-1003 (EQRx Inc), IBI-318 (Innovent Biologics Inc), Ivonescimab (Akeso Inc), Pucotenlimab (Lepu Biopharma Co Ltd), QL-1604 (Qilu Pharmaceutical Co Ltd), SCTI-10A (SinoCelltech Group Ltd), Tebotelimab (MacroGenics Inc), AZD-7789 (AstraZeneca Plc), Budigalimab (AbbVie Inc), EMB-02 (EpimAb Biotherapeutics Inc) Ezabenlimab (Boehringer Ingelheim International GmbH), F-520 (Shandong New Time Pharmaceutical Co Ltd), HX-009 (Waterstone Hanxbio Pty Ltd), Zeluvalimab (Amgen), Peresolimab (Eli Lilly and Co), Rosnilimab (AnaptysBio Inc), Vudalimab (Xencor), Izuralimab (Xencor), Lorigerlimab (MacroGenics Inc), YBL-006 (Y-Biologics Inc), and ONO-4685 (Ono Pharmaceutical Co Ltd), LY-3434172 (Eli Lilly and Co); or (IV) the anti-PD-L1 antibody is selected from the group consisting of atezolizumab (TECENTRIQ®; MPDL3280A; IMpower110; Roche/Genentech), avelumab (BAVENCIO®; MSB001071 8C; EMID Serono & Pfizer), and Durvalumab (MEDI4736; IMFINZI®; AstraZeneca). And other antibodies under development, for example, Lodapolimab (LY3300054, Eli Lily), Pimivalimab (Jounce Therapeutics Inc), SHR-1316 (Jiangsu Hengrui Medicine Co Ltd), Envafolimab (Jiangsu Simcere Pharmaceutical Co Ltd), sugemalimab (CStone Pharmaceuticals Co Ltd), cosibelimab (Checkpoint Therapeutics Inc), pacmilimab (CytomX Therapeutics Inc), IBI-318, IBI-322, IBI-323 (Innovent Biologics Inc), INBRX-105 (Inhibrx Inc), KN-046 (Alphamab Oncology), 6MW-3211 (Mabwell Shanghai Bioscience Co Ltd), BNT-311 (BioNTech SE), FS-118 (F-star Therapeutics Inc), GNC-038 (Systimmune Inc), GR-1405 (Genrix (Shanghai) Biopharmaceutical Co Ltd), HS-636 (Zhejiang Hisun Pharmaceutical Co Ltd), LP-002 (Lepu Biopharma Co Ltd), PM-1003 (Biotheus Inc), PM-8001 (Biotheus Inc), STIA-1015 (ImmuneOncia Therapeutics LLC), ATG-101 (Antengene Corp Ltd), BJ-005 (BJ Bioscience Inc), CDX-527 (Celldex Therapeutics Inc), GNC-035 (Systimmune Inc), GNC-039(Systimmune Inc), HLX-20 (Shanghai Henlius Biotech Inc), JS-003 (Shanghai Junshi Bioscience Co Ltd), LY-3434172 (Eli Lilly and Co), MCLA-145 (Merus NV), MSB-2311 (Transcenta Holding Ltd), PF-07257876 (Pfizer Inc), Q-1802 (QureBio Ltd), QL-301 (QLSF Biotherapeutics Inc), QLF-31907 (Qilu Pharmaceutical Co Ltd), RC-98 (RemeGen Co Ltd), TST-005 (Transcenta Holding Ltd), Atezolizumab (IMpower133), BMS-936559/MDX-1105, and/or RG-7446/MPDL3280A, and YW243.55.570.

57.-71. (canceled)

72. The method of claim 56, wherein said anti-IL18-BP antibody is for use in combination with an immunostimulatory antibody, a cytokine therapy, an immunomodulatory drug, cytotoxic agents, chemotherapeutic agents, growth inhibitory agents, anti-hormonal agents, kinase inhibitors, anti-angiogenic agents, cardioprotectants, immunosuppressive agents, agents that promote proliferation of hematological cells, angiogenesis inhibitors, protein tyrosine kinase (PTK) inhibitors, or other therapeutic agents.

73. The method of claim 56, further comprising administering one or more inflammasome activators, optionally wherein
(i) the inflammasome activator is a chemotherapy agent, optionally wherein the chemotherapy agent is selected from the group consisting of Platinum (including Platinum chemotherapy agent), Paclitaxel (taxol), Sorafenib, Doxorubicin, Sorafenib, 5-FU, Gemcitabine, and Irinotecan (CPT-11); optionally wherein the Platinum chemotherapy agent is Oxaliplatin or Cisplatin;
(ii) the inflammasome activator is a CD39 inhibitor, optionally wherein the CD39 inhibitor is an anti-CD39 antibody; or
(iii) anti-IL18-BP antibody and the immunostimulatory antibody, cytokine therapy, immunomodulatory drug, cytotoxic agents, chemotherapeutic agents, growth inhibitory agents, anti-hormonal agents, kinase inhibitors, anti-angiogenic agents, cardioprotectants, immunosuppressive agents, agents that promote proliferation of hematological cells, angiogenesis inhibitors, protein tyrosine kinase (PTK) inhibitors, or other therapeutic agents are administered sequentially or simultaneously, in any order, and in one or more formulations.

74.-80. (canceled)

81. The method of claim 31, wherein said cancer is selected from the group consisting of renal clear cell carcinoma (RCC), lung cancer, NSCLC, lung adenocarcinoma, lung squamous cell carcinoma, gastric adenocarcinoma, ovarian cancer, endometrial cancer, breast cancer, triple negative breast cancer (TNBC), head and neck tumor, colorectal adenocarcinoma, melanoma, colon cancer, glioblastoma multiforme, pancreatic adenocarcinoma, skin cutaneous melanoma, stomach adenocarcinoma and metastatic melanoma.

82.-84. (canceled)

85. The method of claim 1, wherein the anti-IL18-BP antibody
(I) comprises: the vhCDR1, vhCDR2, vhCDR3, vlCDR1, vlCDR2 and vlCDR3 sequences selected from the group consisting of:
i. the vhCDR1 having an amino acid sequence of SEQ ID NO: 1,
the vhCDR2 having an amino acid sequence of SEQ ID NO: 32,
the vhCDR3 having an amino acid sequence of SEQ ID NO: 3,
the vlCDR1 having an amino acid sequence of SEQ ID NO: 4,
the vlCDR2 having an amino acid sequence of SEQ ID NO: 5, and
the vlCDR3 having an amino acid sequence of SEQ ID NO: 6;
ii. the vhCDR1 having an amino acid sequence of SEQ ID NO: 7,
the vhCDR2 having an amino acid sequence of SEQ ID NO: 8,
the vhCDR3 having an amino acid sequence of SEQ ID NO: 9,
the vlCDR1 having an amino acid sequence of SEQ ID NO: 10,
the vlCDR2 having an amino acid sequence of SEQ ID NO: 11, and
the vlCDR3 having an amino acid sequence of SEQ ID NO: 12;
iii. the vhCDR1 having an amino acid sequence of SEQ ID NO: 13,
the vhCDR2 having an amino acid sequence of SEQ ID NO: 14,
the vhCDR3 having an amino acid sequence of SEQ ID NO: 16,
the vlCDR1 having an amino acid sequence of SEQ ID NO: 16,
the vlCDR2 having an amino acid sequence of SEQ ID NO: 17, and
the vhCDR3 having an amino acid sequence of SEQ ID NO: 18;
iv. the vhCDR1 having an amino acid sequence of SEQ ID NO: 19,
the vhCDR2 having an amino acid sequence of SEQ ID NO: 21,
the vhCDR3 having an amino acid sequence of SEQ ID NO: 21,
the vlCDR1 having an amino acid sequence of SEQ ID NO: 22,
the vlCDR2 having an amino acid sequence of SEQ TD NO: 23, and
the vlCDR3 having an amino acid sequence of SEQ ID NO: 24;
v. the vhCDR1 having an amino acid sequence of SEQ TD NO: 25,
the vhCDR2 having an amino acid sequence of SEQ ID NO: 26,
the vhCDR3 having an amino acid sequence of SEQ ID NO: 27,
the vhCDR1 having an amino acid sequence of SEQ ID NO: 28,
the vlCDR2 having an amino acid sequence of SEQ ID NO: 29, and
the vlCDR3 having an amino acid sequence of SEQ ID NO: 30;
vi. the vhCDR1 having an amino acid sequence of SEQ ID NO: 31,
the vhCDR2 having an amino acid sequence of SEQ ID NO: 32,
the vhCDR3 having an amino acid sequence of SEQ ID NO: 33,
the vlCDR1 having an amino acid sequence of SEQ ID NO: 34,
the vlCDR2 having an amino acid sequence of SEQ ID NO: 35, and
the vlCDR3 having an amino acid sequence of SEQ ID NO: 36;
vii. the vhCDR2 having an amino acid sequence of SEQ ID NO: 37,
the vhCDR2 having an amino acid sequence of SEQ ID NO: 38,
the vhCDR3 having an amino acid sequence of SEQ ID NO: 39,
the vlCDR1 having an amino acid sequence of SEQ ID NO: 40,
the vlCDR2 having an amino acid sequence of SEQ ID NO: 41, and
the vlCDR3 having an amino acid sequence of SEQ ID NO: 42;
viii. the vhCDR2 having an amino acid sequence of SEQ ID NO: 43,
the vhCDR2 having an amino acid sequence of SEQ ID NO: 44,
the vhCDR3 having an amino acid sequence of SEQ ID NO: 45,
the vlCDR1 having an amino acid sequence of SEQ ID NO: 46,
the vlCDR2 having an amino acid sequence of SEQ ID NO: 47, and
the vlCDR3 having an amino acid sequence of SEQ ID NO: 17;
ix. the vhCDR1 having an amino acid sequence of SEQ TD NO: 844,
the vhCDR2 having an amino acid sequence of SEQ ID NO: 845,
the vhCDR3 having an amino acid sequence of SEQ ID NO: 846,
the vlCDR1 having an amino acid sequence of SEQ ID NO: 847,
the vlCDR2 having an amino acid sequence of SEQ ID NO: 848, and
the vlCDR3 having an amino acid sequence of SEQ ID NO: 849;
x. the vhCDR1 having an amino acid sequence of SEQ ID NO: 850,
the vhCDR2 having an amino acid sequence of SEQ ID NO: 851,
the vhCDR3 having an amino acid sequence of SEQ ID NO: 852,
the vlCDR1 having an amino acid sequence of SEQ ID NO: 853,
the vlCDR2 having an amino acid sequence of SEQ ID NO: 854, and
the vlCDR3 having an amino acid sequence of SEQ ID NO: 855;
xi. the vhCDR1 having an amino acid sequence of SEQ ID NO: 856,
the vhCDR2 having an amino acid sequence of SEQ ID NO: 857,
the vhCDR3 having an amino acid sequence of SEQ ID NO: 858,
the vlCDR1 having an amino acid sequence of SEQ ID NO: 859,
the vlCDR2 having an amino acid sequence of SEQ ID NO: 860, and
the vlCDR3 having an amino acid sequence of SEQ ID NO: 861;
xii. the vhCDR2 having an amino acid sequence of SEQ ID NO: 862,
the vhCDR2 having an amino acid sequence of SEQ ID NO: 863,
the vhCDR3 having an amino acid sequence of SEQ ID NO: 864,
the vlCDR1 having an amino acid sequence of SEQ ID NO: 865,
the vlCDR2 having an amino acid sequence of SEQ ID NO: 866, and
the vlCDR3 having an amino acid sequence of SEQ ID NO: 867;
xiii. the vhCDR3 having an amino acid sequence of SEQ ID NO: 55,
the vhCDR2 having an amino acid sequence of SEQ ID NO: 56,
the vhCDR3 having an amino acid sequence of SEQ TD NO: 57,
the vlCDR1 having an amino acid sequence of SEQ TD NO: 60,
the vlCDR2 having an amino acid sequence of SEQ ID NO: 61, and
the vlCDR3 having an amino acid sequence of SEQ ID NO: 62;
xiv. the vhCDR2 having an amino acid sequence of SEQ ID NO: 65,
the vhCDR2 having an amino acid sequence of SEQ ID NO: 66,
the vhCDR3 having an amino acid sequence of SEQ ID NO: 67,
the vlCDR1 having an amino acid sequence of SEQ ID NO: 70,
the vlCDR2 having an amino acid sequence of SEQ ID NO: 71, and
the vlCDR3 having an amino acid sequence of SEQ ID NO: 72;
xv. the vhCDR3 having an amino acid sequence of SEQ ID NO: 75,
the vhCDR2 having an amino acid sequence of SEQ ID NO: 76,
the vhCDR3 having an amino acid sequence of SEQ ID NO: 77,
the vlCDR1 having an amino acid sequence of SEQ ID NO: 80,
the vlCDR2 having an amino acid sequence of SEQ ID NO: 81, and
the vlCDR3 having an amino acid sequence of SEQ ID NO: 82;
xvi. the vhCDR1 having an amino acid sequence of SEQ ID NO: 85,
the vhCDR2 having an amino acid sequence of SEQ ID NO: 86,
the vhCDR3 having an amino acid sequence of SEQ ID NO: 87,
the vlCDR1 having an amino acid sequence of SEQ ID NO: 90,
the vlCDR2 having an amino acid sequence of SEQ ID NO: 91, and
the vlCDR3 having an amino acid sequence of SEQ ID NO: 92;
xvii. the vhCDR2 having an amino acid sequence of SEQ ID NO: 95,
the vhCDR2 having an amino acid sequence of SEQ TD NO: 96,
the vhCDR3 having an amino acid sequence of SEQ ID NO: 97,
the vlCDR1 having an amino acid sequence of SEQ TD NO: 100,
the vlCDR2 having an amino acid sequence of SEQ TD NO: 101, and
the vlCDR3 having an amino acid sequence of SEQ TD NO: 102;
xviii. the vhCDR1 having an amino acid sequence of SEQ ID NO: 105,
the vhCDR2 having an amino acid sequence of SEQ ID NO: 106,
the vhCDR3 having an amino acid sequence of SEQ ID NO: 107,
the vlCDR1 having an amino acid sequence of SEQ ID NO: 110,
the vlCDR2 having an amino acid sequence of SEQ ID NO: 111, and
the vlCDR3 having an amino acid sequence of SEQ ID NO: 112;
xix. the vhCDR1 having an amino acid sequence of SEQ ID NO: 115,
the vhCDR2 having an amino acid sequence of SEQ ID NO: 116,
the vhCDR3 having an amino acid sequence of SEQ ID NO: 117,
the vlCDR1 having an amino acid sequence of SEQ ID NO: 120,
the vlCDR2 having an amino acid sequence of SEQ ID NO: 121, and
the vlCDR3 having an amino acid sequence of SEQ ID NO: 122;
xx. the vhCDR2 having an amino acid sequence of SEQ ID NO: 125,
the vhCDR2 having an amino acid sequence of SEQ ID NO: 126,
the vhCDR3 having an amino acid sequence of SEQ ID NO: 127,
the vlCDR1 having an amino acid sequence of SEQ ID NO: 130,
the vlCDR2 having an amino acid sequence of SEQ ID NO: 131, and
the vhCDR3 having an amino acid sequence of SEQ ID NO: 132;
xxi. the vhCDR1 having an amino acid sequence of SEQ ID NO: 135,
the vhCDR2 having an amino acid sequence of SEQ ID NO: 136,
the vhCDR3 having an amino acid sequence of SEQ ID NO: 137,
the vlCDR1 having an amino acid sequence of SEQ ID NO: 140,
the vlCDR2 having an amino acid sequence of SEQ ID NO: 141, and
the vhCDR3 having an amino acid sequence of SEQ ID NO: 142;
xxii. the vhCDR1 having an amino acid sequence of SEQ TD NO: 145,
the vhCDR2 having an amino acid sequence of SEQ ID NO: 146,
the vhCDR3 having an amino acid sequence of SEQ ID NO: 147,
the vlCDR1 having an amino acid sequence of SEQ ID NO: 150,
the vlCDR2 having an amino acid sequence of SEQ ID NO: 151, and
the vlCDR3 having an amino acid sequence of SEQ ID NO: 152;
xxiii. the vhCDR1 having an amino acid sequence of SEQ ID NO: 155,
the vhCDR2 having an amino acid sequence of SEQ ID NO: 156,
the vhCDR3 having an amino acid sequence of SEQ ID NO: 157,
the vlCDR1 having an amino acid sequence of SEQ ID NO: 160,
the vlCDR2 having an amino acid sequence of SEQ ID NO: 161, and
the vlCDR3 having an amino acid sequence of SEQ ID NO: 162;
xxiv. the vhCDR2 having an amino acid sequence of SEQ ID NO: 165,
the vhCDR2 having an amino acid sequence of SEQ ID NO: 166,
the vhCDR3 having an amino acid sequence of SEQ ID NO: 167,
the vlCDR1 having an amino acid sequence of SEQ ID NO: 170,
the vlCDR2 having an amino acid sequence of SEQ ID NO: 171, and
the vlCDR3 having an amino acid sequence of SEQ ID NO: 172;
xxv. the vhCDR3 having an amino acid sequence of SEQ ID NO: 175,
the vhCDR2 having an amino acid sequence of SEQ ID NO: 176,
the vhCDR3 having an amino acid sequence of SEQ ID NO: 177,
the vlCDR1 having an amino acid sequence of SEQ ID NO: 180,
the vlCDR2 having an amino acid sequence of SEQ ID NO: 181, and
the vlCDR3 having an amino acid sequence of SEQ ID NO: 182;
xxvi. the vhCDR1 having an amino acid sequence of SEQ ID NO: 185,
the vhCDR2 having an amino acid sequence of SEQ ID NO: 186,
the vhCDR3 having an amino acid sequence of SEQ ID NO: 187,
the vlCDR1 having an amino acid sequence of SEQ TD NO: 190,
the vlCDR2 having an amino acid sequence of SEQ TD NO: 191, and
the vlCDR3 having an amino acid sequence of SEQ TD NO: 192;
xxvii. the vhCDR2 having an amino acid sequence of SEQ ID NO: 195,
the vhCDR2 having an amino acid sequence of SEQ ID NO: 196,
the vhCDR3 having an amino acid sequence of SEQ ID NO: 197,
the vlCDR1 having an amino acid sequence of SEQ ID NO: 200,
the vlCDR2 having an amino acid sequence of SEQ TD NO: 201, and
the vlCDR3 having an amino acid sequence of SEQ ID NO: 202;
xxviii. the vhCDR1 having an amino acid sequence of SEQ ID NO: 205,
the vhCDR2 having an amino acid sequence of SEQ ID NO: 206,
the vhCDR3 having an amino acid sequence of SEQ ID NO: 207,
the vlCDR1 having an amino acid sequence of SEQ ID NO: 210,
the vlCDR2 having an amino acid sequence of SEQ ID NO: 211, and
the vlCDR3 having an amino acid sequence of SEQ ID NO: 212;
xxix. the vhCDR2 having an amino acid sequence of SEQ ID NO: 215,
the vhCDR2 having an amino acid sequence of SEQ ID NO: 216,
the vhCDR3 having an amino acid sequence of SEQ ID NO: 217,
the vlCDR1 having an amino acid sequence of SEQ ID NO: 220,
the vlCDR2 having an amino acid sequence of SEQ ID NO: 221, and
the vlCDR3 having an amino acid sequence of SEQ ID NO: 222;
xxx. the vhCDR1 having an amino acid sequence of SEQ TD NO: 225,
the vhCDR2 having an amino acid sequence of SEQ ID NO: 226,
the vhCDR3 having an amino acid sequence of SEQ ID NO: 227,
the vhCDR1 having an amino acid sequence of SEQ ID NO: 230,
the vhCDR2 having an amino acid sequence of SEQ ID NO: 231,
the vlCDR3 having an amino acid sequence of SEQ ID NO: 232, and
the vlCDR1 having an amino acid sequence of SEQ ID NO: 232;
xxxi. the vhCDR1 having an amino acid sequence of SEQ TD NO: 235,
the vhCDR2 having an amino acid sequence of SEQ ID NO: 236,
the vhCDR3 having an amino acid sequence of SEQ ID NO: 237,
the vlCDR1 having an amino acid sequence of SEQ ID NO: 240,
the vlCDR2 having an amino acid sequence of SEQ ID NO: 241, and
the vlCDR3 having an amino acid sequence of SEQ ID NO: 242; and
xxxii. the vhCDR1 having an amino acid sequence of SEQ ID NO: 245,
the vhCDR2 having an amino acid sequence of SEQ ID NO: 246,
the vhCDR3 having an amino acid sequence of SEQ ID NO: 247,
the vlCDR1 having an amino acid sequence of SEQ ID NO: 250,
the vlCDR2 having an amino acid sequence of SEQ ID NO: 251, and
the vlCDR3 having an amino acid sequence of SEQ ID NO: 252.

86. The method of claim 1, wherein the anti-IL18-BP antibody comprises the heavy chain variable domain and the light chain variable domain of an antibody selected from the group consisting of
i. the heavy chain variable domain having an amino acid sequence of SEQ ID NO: 54 and the light chain variable domain having an amino acid sequence of SEQ ID NO: 59;
ii. the heavy chain variable domain having an amino acid sequence of SEQ ID NO: 64 and the light chain variable domain having an amino acid sequence of SEQ ID NO: 69;
iii. the heavy chain variable domain having an amino acid sequence of SEQ ID NO: 74 and the light chain variable domain having an amino acid sequence of SEQ ID NO: 79;
iv. the heavy chain variable domain having an amino acid sequence of SEQ ID NO: 84 and the light chain variable domain having an amino acid sequence of SEQ ID NO: 89;
v. the heavy chain variable domain having an amino acid sequence of SEQ ID NO: 94 and the light chain variable domain having an amino acid sequence of SEQ ID NO: 99;
vi. the heavy chain variable domain having an amino acid sequence of SEQ ID NO: 104 and the light chain variable domain having an amino acid sequence of SEQ ID NO: 109;
vii. the heavy chain variable domain having an amino acid sequence of SEQ ID NO: 114 and the light chain variable domain having an amino acid sequence of SEQ ID NO: 119;
viii. the heavy chain variable domain having an amino acid sequence of SEQ ID NO: 124 and the light chain variable domain having an amino acid sequence of SEQ ID NO: 129;
ix. the heavy chain variable domain having an amino acid sequence of SEQ ID NO: 134 and the light chain variable domain having an amino acid sequence of SEQ ID NO: 139;
x. the heavy chain variable domain having an amino acid sequence of SEQ ID NO: 144 and the light chain variable domain having an amino acid sequence of SEQ ID NO: 149;
xi. the heavy chain variable domain having an amino acid sequence of SEQ ID NO: 154 and the light chain variable domain having an amino acid sequence of SEQ ID NO: 159;
xii. the heavy chain variable domain having an amino acid sequence of SEQ ID NO: 164 and the light chain variable domain having an amino acid sequence of SEQ ID NO: 169;
xiii. the heavy chain variable domain having an amino acid sequence of SEQ ID NO: 174 and the light chain variable domain having an amino acid sequence of SEQ ID NO: 179;
xiv. the heavy chain variable domain having an amino acid sequence of SEQ ID NO: 184 and the light chain variable domain having an amino acid sequence of SEQ ID NO: 189;
xv. the heavy chain variable domain having an amino acid sequence of SEQ ID NO: 194 and the light chain variable domain having an amino acid sequence of SEQ ID NO: 199;
xvi. the heavy chain variable domain having an amino acid sequence of SEQ ID NO: 204 and the light chain variable domain having an amino acid sequence of SEQ ID NO: 209;
xvii. the heavy chain variable domain having an amino acid sequence of SEQ ID NO: 214 and the light chain variable domain having an amino acid sequence of SEQ ID NO: 219;
xviii. the heavy chain variable domain having an amino acid sequence of SEQ ID NO: 224 and the light chain variable domain having an amino acid sequence of SEQ ID NO: 229;
xix. the heavy chain variable domain having an amino acid sequence of SEQ ID NO: 234 and the light chain variable domain having an amino acid sequence of SEQ ID NO: 239; and
xx. the heavy chain variable domain having an amino acid sequence of SEQ ID NO: 244 and the light chain variable domain having an amino acid sequence of SEQ ID NO: 249.

87.-91. (canceled)

92. The method of claim 1, wherein the anti-IL18-BP antibody comprises:
(I)
i. a heavy chain variable domain, comprising:
a) CDR-H1 having the sequence Y-T-F-X-X2-Y-A-X3-H, wherein X is N, R, D, G or K; X2 is S, H, I or Q; X3 is M or V;
b) CDR-H2 having the sequence W-I-H-A-G-T-G-X-T-X2-Y-S-Q-K-F-Q-G, wherein X is N, A or V; X2 is K or LW-I-H; and
c) CDR-H3 having the sequence A-R-G-L-G-X-V-G-P-T-G-T-S-W-F-D-P, wherein X is S or E; and
ii. a light chain variable domain, comprising:
a) CDR-L1 having the sequence R-A-S-Q-G-I-S-S-W-L-A;
b) CDR-L2 having the sequence E-A-S-S-L-E-S; and
c) CDR-L3 having the sequence Q-Q-Y-R-X-X2-P-F-T, wherein X is S, V, Y, L or Q; X2 is F, S or G;
(II)
i. a heavy chain variable domain, comprising:
a) CDR-H1 having the sequence G-T-F-X-X2-Y-X3-I-S, wherein X is S or N; X2 is E or S; X3 is V or P;
b) CDR-H2 having the sequence G-I-I-P-X-X2-G-T-A-X3-Y-A-Q-K-F-Q-G, wherein X is G or Y; X2 is A or S; X3 is N, I, or V; and
c) CDR-H3 having the sequence A-R-G-R-H-X-H-E-T, wherein X is S, G or F; and
ii. a light chain variable domain, comprising:
a) CDR-L1 having the sequence R-A-S-Q-G-I-S-S-W-L-A
b) CDR-L2 having the sequence A-A-S-S-L-Q-S
c) CDR-L3 having the sequence Q-Q-V-Y-X-X2-P-W-T, wherein X is S or R; X2 is L I, or F;
(III)
i. a heavy chain variable domain, comprising:
a) CDR-H1 having the sequence F-T-F-X-N-X2-A-M-S, wherein X is G or D or S; X2 is Tor V or Y;
b) a CDR-H2 having the sequence A-I-S-X-X1-X2-G-S-T-Y-Y-A-D-S-V-K-G, wherein X is G or A; X2 is N or S; X3 is A or G; and
c) a CDR-H3 having the sequence A-K-G-P-D-R-Q-V-F-D-Y; and
ii. a light chain variable domain, comprising:
a) a CDR-L1 having the sequence R-A-S-Q-G-I-X-S-W-L-A, wherein X is S or D;
b) a CDR-L2 having the sequence A-A-S-S-L-Q-S; and
c) a CDR-L3 having the sequence Q-H-A-X-X1-F-P-Y-T, wherein X is Y or L; X1 is S or F;
(IV)
i. a heavy chain variable domain, comprising:
a) CDR-H1 having the sequence G-S-I-S-S-X-X2-Y-X3-W-G, wherein X is S or P; X2 is E or D; X3 is G, Y, or P;
b) CDR-H2 having the sequence S-I-X-X2-X3-G-X4-T-Y-Y-N-P-S-L-K-S, wherein X is Y or V; X2 is Y or N; X3 is Q or S; X4 is S or A; and
c) CDR-H3 having the sequence A-R-G-P-X-R-Q-X2-F-D-Y, wherein X is Y or H, X2 is V or L; and
ii. a light chain variable domain, comprising:
a) CDR-L1 having the sequence R-A-S-Q-G-I-S-S-W-L-A
b) CDR-L2 having the sequence A-A-S-S-L-Q-S
c) CDR-L3 having the sequence Q-Q-G-X-X2-F-P-Y-T, wherein X is S or F; X2 is S or V;
(V)
i. a heavy chain variable domain, comprising:
a) CDR-H1 having the sequence Y-T-F-X-X2-Y-A-X3-H, wherein X is any amino acid; X2 is any amino acid; X3 is any amino acid;
b) CDR-H2 having the sequence W-I-H-A-G-T-G-X-T-X2-Y-S-Q-K-F-Q-G, wherein X is any amino acid; X2 is any amino acid; and
c) CDR-H3 having the sequence A-R-G-L-G-X-V-G-P-T-G-T-S-W-F-D-P, wherein X is any amino acid; and
ii. a light chain variable domain, comprising:
a) CDR-L1 having the sequence R-A-S-Q-G-I-S-S-W-L-A;
b) CDR-L2 having the sequence E-A-S-S-L-E-S; and
c) CDR-L3 having the sequence Q-Q-Y-R-X-X2-P-F-T, wherein X is any amino acid; X2 is any amino acid:
(VI)
i. a heavy chain variable domain, comprising:
a) CDR-H1 having the sequence G-T-F-X-X2-Y-X3-I-S, wherein X is any amino acid; X2 is any amino acid; X3 is any amino acid;
b) CDR-H2 having the sequence G-I-I-P-G-X2-G-T-A-X3-Y-A-Q-K-F-Q-G, wherein X is any amino acid; X2 is any amino acid; X3 is any amino acid; and
c) CDR-H3 having the sequence A-R-G-R-H-X-H-E-T, wherein X is any amino acid; and
ii. a light chain variable domain, comprising:
a) CDR-L1 having the sequence R-A-S-Q-G-I-S-S-W-L-A;
b) CDR-L2 having the sequence A-A-S-S-L-Q-S; and
c) CDR-L3 having the sequence Q-Q-V-Y-X-X2-P-W-T, wherein X is any amino acid; X2 is any amino acid:
(VII)
i. a heavy chain variable domain, comprising:
a) CDR-H1 having the sequence F-T-F-X-N-X2-A-M-S, wherein X is any amino acid; X2 is any amino acid:
b) CDR-H2 having the sequence A-I-S-X-X1-X2-G-S-T-Y-Y-A-D-S-V-K-G, wherein X is any amino acid; X2 is any amino acid; X3 is any amino acid; and
c) CDR-H3 having the sequence A-K-G-P-D-R-Q-V-F-D-Y;
ii. a light chain variable domain, comprising:
a) CDR-L1 having the sequence R-A-S-Q-G-I-X-S-W-L-A, wherein X is any amino acid;
b) CDR-L2 having the sequence A-A-S-S-L-Q-S; and
c) CDR-L3 having the sequence Q-H-A-X-X1-F-P-Y-T, wherein X is any amino acid; X2 is any amino acid:
(VIII)
i. a heavy chain variable domain, comprising:
a) CDR-H1 having the sequence G-S-I-S-S-X-X2-Y-X3-W-G, wherein X is any amino acid; X2 is any amino acid; X3 is any amino acid:
b) CDR-H2 having the sequence S-I-X-X2-X3-G-X4-T-Y-Y-N-P-S-L-K-S, wherein X is any amino acid; X2 is any amino acid; X3 is any amino acid; X4 is any amino acid; and
c) CDR-H3 having the sequence A-R-G-P-X-R-Q-X2-F-D-Y, wherein X is any amino acid, X2 is any amino acid; and
ii. a light chain variable domain, comprising:
a) CDR-L1 having the sequence R-A-S-Q-G-I-S-S-W-L-A;
b) CDR-L2 having the sequence A-A-S-S-L-Q-S; and
c) CDR-L3 having the sequence Q-Q-G-X-X2-F-P-Y-T, wherein X is any amino acid; X2 is any amino acid;
(IX)
i. a heavy chain variable domain, comprising:
a) CDR-H1 having the sequence Y-T-F-X-X2-Y-A-X3-H, wherein X is N, R, D, G, T, Q, S, A or K; X2 is S, H, I, N, L, Y or Q; X3 is M or V:
b) CDR-H2 having the sequence X-I-X2-A-G-X3-X4-X5-T-X6-Y-S-Q-K-F-Q-G, wherein X is W or Y; X2 is H or N; X3 is S,T or A; X4 is G or A; X5 is N, A, T or V; X6 is E, K or L; and
c) CDR-H3 having the sequence A-R-G-L-G-X-V-G-P-T-G-T-S-W-F-D-P, wherein X is S, L, A, K or E; and
ii. a light chain variable domain, comprising:
a) CDR-L1 having the sequence R-A-S-Q-G-I-S-S-W-L-A;
b) CDR-L2 having the sequence E-A-S-S-E-S, wherein X is L or S; and
c) CDR-L3 having the sequence Q-Q-Y-R-X-X2-P-F-T, wherein X is S, V, Y, L, T or Q; X2 is F, S, Y or G:
(X)
i. a heavy chain variable domain, comprising:
a) CDR-H1 having the sequence G-T-F-X-X2-Y-X3-I-S, wherein X is S or N; X2 is E or S; X3 is V or P
b) CDR-H2 having the sequence G-I-I-P-X-X2-G-T-A-X3-Y-A-Q-K-F-Q-G, wherein X is G, S, I or Y; X2 is A, V or S; X3 is N, I or V; and
c) CDR-H3 having the sequence A-R-G-R-H-X-H-E-T, wherein X is S, G, or F; and
ii. a light chain variable domain, comprising:
a) CDR-L1 having the sequence R-A-S-Q-G-I-S-S-W-L-A;
b) CDR-L2 having the sequence A-A-S-S-L-Q-S; and
c) CDR-L3 having the sequence Q-Q-X-Y-X2-X3-P-W-T, wherein X is V or L; X2 is S or R; X3 is L, I or F:
(XI)
i. a heavy chain variable domain, comprising:
a) CDR-H1 having the sequence F-T-F-X-X2-X3-X4-M-S, wherein X is G, S, P or D or S; X2 is N, S or P; X3 is T, V or Y; X4 is A, H or I:
b) a CDR-H2 having the sequence A-I-S-X-X2-X3-X4-X5-T-X6-Y-A-D-S-V-K-G, wherein X is G or A; X2 is N, T, E or S; X3 is A or G; X4 is A or G; X5 is S or G; X6 is Y or F; and
c) a CDR-H3 having the sequence A-K-G-P-D-R-Q-V-F-D-Y; and
ii. a light chain variable domain, comprising:
a) a CDR-L1 having the sequence R-A-S-Q-G-I-X-S-W-L-A, wherein X is S or D:
b) a CDR-L2 having the sequence A-A-S-S-L-Q-S; and
c) a CDR-L3 having the sequence Q-H-X-X2-X3-F-P-Y-T, wherein X is A or G; X2 is Y, R or L; X3 is S, R, L or F; or
(XII)
i. a heavy chain variable domain, comprising:
a) CDR-H1 having the sequence G-S-I-X-S-X2-X3-Y-X4-W-X5, wherein X is S or F; X2 is S or P; X3 is E or D; X4 is G,P or Y; X5 is G or S;
b) CDR-H2 having the sequence X-I-X2-X3-X4-G-X5-T-Y-Y-N-P-S-L-K-S, wherein X is S or V; X2 is Y, V, F or A; X3 is Y,F or N; X4 is Q, A or S; X5 is S, A or N; and
c) CDR-H3 having the sequence A-R-G-P-X-R-Q-X2-F-D-Y, wherein X is Y, H or F; X2 is V or L; and
ii. a light chain variable domain, comprising:
a) CDR-L1 having the sequence R-A-S-Q-G-I-S-S-W-L-A;
b) CDR-L2 having the sequence A-A-S-S-L-Q-S; and
c) CDR-L3 having the sequence Q-Q-G-X-X2-F-P-Y-T, wherein X is S N, W or F; X2 is S or V.

93.-108. (canceled)

109. The method of claim 1, wherein the anti-IL18-BP antibody comprises
(i) the CH1-hinge-CH2-CH3 region from human IgG1, IgG2, IgG3, or IgG4, optionally wherein the CH1-hinge-CH2-CH3 region is from human IgG4, optionally wherein the hinge region comprises mutations;
(ii) a CL region of human kappa 2 light chain; or
(iii) a CL region of human lambda 2 light chain.

110.-126. (canceled)

127. The method of claim 1, wherein the anti-IL18-BP antibody exhibits a binding affinity or KD of less than 0.005 pM, 0.01 pM, 0.02 pM, 0.03 pM, 0.04 pM, 0.05 pM, 0.06 pM, 0.07 pM, 0.08 pM, 0.09 pM, 0.10 pM, 0.15 pM, 0.20 pM, 0.25 pM, 0.30 pM, 0.35 pM, 0.40 pM, 0.45 pM, 0.50 pM, 0.55 pM, 0.60 pM, 0.65 pM, 0.70 pM, 0.75 pM, 0.80 pM, 0.85 pM, 0.90 pM, 0.95 pM, or 1 pM.

128. The method of claim 1, wherein the anti-IL18-BP antibody binds a conformational epitope comprising a first amino acid sequence comprising one or more amino acid residues of SEQ ID NO: 1917, and/or a second amino acid sequence comprising one or more amino acid residues of SEQ ID NO: 1919;
optionally wherein the anti-IL18-BP antibody binds
(i) one or more of residues S1, R2, F3, P4, N5, F6, S7, I8, and L9 of SEQ ID NO: 1917,
(ii) one or more of residues S7, I8, and L9 of SEQ ID NO: 1917, or
(iii) residues S7, I8, and L9 of SEQ ID NO: 1917; or
optionally wherein the anti-IL18-BP antibody binds
(i) one or more of residues V1, D2, P3, E4, Q5, V6, V7, Q8, and R9 of SEQ ID NO: 1919;
(ii) one or more of residues D2, P3, E4, Q5, V6, V7, Q8, and R9 of SEQ ID NO: 1919, or
(iii) residues D2, P3, E4, Q5, V6, V7, Q8, and R9 of SEQ ID NO: 1919.

129.-134. (canceled)

135. The method of claim 1, wherein the anti-IL18-BP antibody binds IL18-BP isoform a or IL18-BP isoform c; optionally wherein the anti-IL18-BP antibody does not bind IL18-BP isoform b or d.

136.-140. (canceled)
